United States Patent Application Publication US 2007/0237770 A1 - sequence listing, part 2

SEQ ID NO: 86 - DNA, 128963 bp, Homo sapiens
  misc_feature (1)...(128963): n = A,T,C or G
nnnnnnnnnnnnnnnnnnnnnnnnnnnnnnnnnnnnnnnnnnnnnnnnnnnnnnnnnnnnnnnnnnnnnnnnnnnnnnnnnnnnnnnnnnnnnnnnnnnnnnnnnnnnnnnnnnnnnnnnnnnnnnnnnnnnnnnnnnnnnnnnnnnnnnnnnnnnnnnnnnnnnnnnnnnnnnnnnnnnnnnnnnnnnnnnnnnnnnnnnnnnnnnnnnnnnnnnnnnnnnnnnnnnnnnnnnnnnnnnnnnnnnnnnnnnnnnnnnnnnnnnnnnnnnnnnnnnnnnnnnnnnnnnnnnnnnnnnnnnnnnnnnnnnnnnnnnnnnnnnnnnnnnnnnnnnnnnnnnnnnnnnnnnnnnnnnnnnnnnnnnnnnnnnnnnnnnnnnnnnnnnnnnnnnnnnnnnnnnnnnnnnnnnnnnnnnnnnnnnnnnnnnnnnnnnnnnnnnnnnnnnnnnnnnnnnnnnnnnnnnnnnnnnnnnnnnnnnnnnnnnnnnnnnnnnnnnnnnnnnnnnnnnnnnnnnnnnnnnnnnnnnnnnnnnnnnnnnnnnnnnnnnnnnnnnnnnnnnnnnnnnnnnnnnnnnnnnnnnnnnnnnnnnnnnnnnnnnnnnnnnnnnnnnnnnnnnnnnnnnnnnnnnnnnnnnnnnnnnnnnnnnnnnnnnnnnnnnnnnnnnnnnnnnnnnnnnnnnnnnnnnnnnnnnnnnnnnnnnnnnnnnnnnnnnnnnnnnnnnnnnnnnnnnnnnnnnnnnnnnnnnnnnnnnnnnnnnnnnnnnnnnnnnnnnnnnnnnnnnnnnnnnnnnnnnnnnnnnnnnnnnnnnnnnnnnnnnnnnnnnnnnnnnnnnnnnnnnnnnnnnnnnnnnnnnnnnnnnnnnnnnnnnnnnnnnnnnnnnnnnnnnnnnnnnnnnnnnnnnnnnnnnnnnnnnnnnnnnnnnnnnnnnnnnnnnnnnnnnnnnnnnnnnnnnnnnnnnnnnnnnnnnnnnnnnnnnnnnnnnnnnnnnnnnnnnnnnnnnnnnnnnnnnnnnnnnnnnnnnnnnnnnnnnnnnnnnnnnnnnnnnnnnnnnnnnnnnnnnnnnnnnnnnnnnnnnnnnnnnnnnnnnnnnnnnnnnnnnnnnnnnnnnnnnnnnnnnnnnnnnnnnnnnnnnnnnnnnnnnnnnnnnnnnnnnnnnnnnnnnnnnnnnnnnnnnnnnnnnnnnnnnnnnnnnnnnnnnnnnnnnnnnnnnnnnnnnnnnnnnnnnnnnnnnnnnnnnnnnnnnnnnnnnnnnnnnnnnnnnnnnnnnnnnnnnnnnnnnnnnnnnnnnnnnnnnnnnnnnnnnnnnnnnnnnnnnnnnnnnnnnnnnnnnnnnnnnnnnnnnnnnnnnnnnnnnnnnnnnnnnnnnnnnnnnnnnnnnnnnnnnnnnnnnnnnnnnnnnnnnnnnnnnnnnnnnnnnnnnnnnnnnnnnnnnnnnnnnnnnnnnnnnnnnnnnnnnnnnacagaccagccattcagaagcaattttcttcaggctgaaattatgtgctgaccttagcagatcacttcccataataacccttcccccacccaatgctaaatacaatctgtctcctactcactgtaataacgtgcaaatgactgtaattttacagacaagaaacagccgaaagtgaaacgtgtctaaacagaggtcgatttgaaaaatcagggctattacctaaatctgtaaaatacatattgtaataaaaccagcaacagaaatctccaataagtagttcttttttttttttttttttttaatgtagcttgtgttttgatcttctttatgcagccagtctctgctggcataaaagaaaaatccttttccagaaatggtttcattacacgagatgtaaattgccttactttgctaactgatcctcagaccttgcttgagcacccactcagatatagctgcacacaccacaccacaaaagcccgagccaagcggaggtacaatttcagatacttaacactgacctacattgcacttctcttaatgagagcagtatacaaatgttttcctttaaagatcacattgttttgccatattttgctaggttctctagagctgcaaggcataaaaaagacaatttgctgctttttattttgattattttaagatggaggattagagactatatgaggaattacataaacatagagggtttataagtatataaagttcttcaactttatattgctttactaattaaatgcattgtagtcttaaataaattcacgtaatatttgctctatatcatcgcaacttgtttaaggtaaactgtattgtaaagacatgtcaagacagttattactttccctcccttgggtggagggtctttttgttatactctaaggaatttaaactgaaggtgaattaatagggcatagaagtatcttgaaaagttaacatagcagagtaatacgatgtgtgtaaatagtcgtatttacaaaatgtatattggaaatgtcccacagtctttcatggcagggagaacattgttgatgtttttcttctctgagacccttcatgctccccaaaaggacctgaaatgttatggtgtgcaggggcccttctttccacggtagacaaggctcttagtgctttgtcttgttccagtgatatttcaggataatgcaaaacgtcaaatgtttgaccaagaacaacactgctcgtctccttttggcaacagttatccagaaatggatatttttgtttttttaaaaagacagggtccggctctgttgcccaggctagagtgcagtggcgtgattatggctcactgcagcctcgacctcctgggctcaggtgatccttttgcctcagcctcctgagtagctggcattatagaccaccttgcctgactagtttttttgattttatatagagacggggtcaccctatgttgcccaggctggtcttgcacttctgggctcaaggcatcttctcaccccagcctctaaaagtgttgagattacatgcatgagtcaccacatccagcctgggaaatggatattgtttaaagtactacccagaaacttaaattggatttagcatgcaggtgtgaaaaagtagagacagtgttttttctagaggacctttagcaagtcaggatgttacctgtagggaaaaaaagcaaagaccttcttgtgtttgtgtgggtgtttaataagtcatcaactgtattccctagaaaccagggcaggacacctgcccactgccttgaggccatcctgttgataagcaaacccagagagataagaatctttctccataatcctctgggatagccagtaagtttctcattatgtctaaattaagttctttttcctataaattaaccccatttccatgttggtttcattttttataactttgttttccactttttcccttgatcctgagtagatctcaagtgtcaatgttggcataaatatagaaaaggtaggcctaggaatagactcccttacaaatacacaaaaactggagaaatagatatatatttagacatgttctcattctgttgcccagactggagtatagcagtatgatcatagcttactgcagcctccaactcctggccgttaatgatcctcccacctcagcctccagagtagctaggacataggcatgtgccaccacgcctggctaactttttaaaaattttttgtagccgagcacggtggctcacacctgtaatcccagcactttgggtggctgaggcgggaggatcacgaggtcaggaatttgagatcagcctgaccaacatggtgaaaccccgtctctactaaaatacaaaaattagccaagcgtggtggcgcacacctgtaatctcatgtactcaggaggctgaggcagaagaatcccttgaactcggcaggtggaggttgtagtgagctgagatggcgccacagcattccagcctgggcgacagagtgagactgactcaaaaagaaaaaaaaaaagaaaaaaaaattttatagagacagggtctcgctatgctgagcaggctggtcttgaattcctggtttcaagcgatcctccagcctcagcttcccaaagtgctgggattacaagcatgagtcactgggcctagcccaagaaataatctttgatctttaataatataccctaaatcagaggaaataggcaccaaagaaagatcaccatgttttcctgtgttactgctagaagcccctggcctcctcagcattgagatcgtctgtctttaaaaaaggaggaaagggaccttttgatgaccttaacaatgatgtagtacaagcaggggcagagctgatcttgagatccaaggagcgggtagtggaggttgttggagggggatgatactgttttgtttgtttgtttgtttgtttgtttttgagatggagttttgctcttgttgcccaggctgcagttcaatggcgcgatctcggcttgctgcaacctctgcctcctaggttcaagcaattctcctgcctcagcctcccgagtagctgggattacaggcatgcaccaccacgcctggctaattttgtatttttagtagagatggcggtttctccatgttggtcaggcgagtctcaaactcccgacctcaggtgatccgcccacgtcggcctccaaagagctggatgatactttttaaatgccccttttacactatcctcatgctccttccacccctctgttccaaatactcatttcctgacatctcctcctttctaccacatctctgagtagacactaaggtgtaaaattacatagtgcttatattatacagtagtgtattgatattatgaagtatatgcatgtggatattagaatggtgacaaataggttcctagttaccttgatgagagattaagataacattttcatctctataaatacagaaaacttcccaattttgtgagaggagtagctctgattttcaaaactggtagttaattgtcttagtttcagtcatcaattagctgatggtcctctgatgccttttgattggcccctttgtcaaacaaaacaaaacaaaacaaacacaagaaaagccagtctgacaacactggtttattcaaaagtctcctggaagaacctgggaggaaggaggtgggggtggggtgtaaatggagtgtggagatgttggaatggaaggaaatactttaatttatcaaaatggtttgggttaaatatgtggtagagtcgggcctaagccttcatcttgggccagtagggtttctcagaaaggtttaaggtttgggtttaagtgttgaagctcgggttagattagattatttgattattacaaaccctaaactttggttttagttagacttcatctgtgctgcagacgctgtaatttgttttgtattggaggaactccaatcttctccagcttcactaggtctcatttttaaatgtcccattcttttaagaactacctatatattatttccaaactaatataacatatggggtaggcatgggcttccaaaggctgagatgtagatgacaccccagggacacaggaagtgcccaagagtgatctgatcctttgagaaatcactcttttagaagaagaaaagttaaaaaacagtatggtgctgtattcttatcaatggggcatacacaaatgtaaaatctgtatattcaaaaatataaaacaaatctcaaagctaaaatggaggctaggtagatatcagatccctaatttgcccattttatttgttaaagtacagctttgatttgaatacaaattgacttagggagagctaaggactagtacagattgcattcctctggtttatatgtcccaataaagggtggaaactgctgtttattactatttgcagcctcaaatctagttcatttatggtagtgaaacagctaattggcaatttttttatggactaaatatattgaaagctcaaacatgagtcaatagccattatttaaaatatgtgacataaatatttttattgatccacgaagtcatcactgaatatttacatcagaagctgtcttctgctagcactcattcactttacatgtccatatgactcagttaagacacaaccttaaattacaattgtcacgtggaaattacaatcccagtagtactggatctttaaaacttgggatcatgatgctttcagtttacagtaacctttgactttcaaatgtccatattgtagcttctaaaaacaatgaaggtaacaataaaaaattaaaaattaaatgtactctaaaggcttaatatatgtaaatacattagcttaaatatgttagctgttatagtaaaatgttaaacttgttatttcatattaacctctcttatcctatgagctgagtctcattaacttggttgctggcatttgtcctacaataaattctaaaatatttctgtgtttgtggattgtagatgtagcattcagaggattcatgatgcccccttccccaccagtggggttaaagatatgggggaagaggaattctgacccttccacagtttaaatacgtgtactgggactgtttaacagttaatcttcctagtacatttaactttcataagtcgattttttaaaagatgaggctggcccgaggtgttactatgtttagctggggccttattttaatattaagtttttcttttttggagtcacataacaccaggtggaaaagatttgttactaattccagggaagaaccattcacatagtgttggttaaatggtcgcctgcgttcacacttcagtgcctgtagaccagagccctggaaacaaaagggttacttgtttccccaccatcgcctttacccgcagatcgatttttcttatttaatcagcgagtaaaaagagagacacagggaagaaaaaaaaaaaaaactgcaggaagggcaaagtggtggggggagggttgaaagccagaagctgcaatacagaaaatcagtcttgggagttgggctgcgaagtccttggaacaaggaagggaagccggcaaaatgctcgcagtcagttccacacagccagcctcccttttctcttcgctacgcgctagcggctcgtttggcttctctctgccaccgagcgatcacatacattatttcccccaagataacacaatcaaacttgtatttaccgacatcctctcctcgcagcccgtttgagatttgttttaataaataagtgttttatgtgaatgatgtagtaattgaaaggggcgcaccatttttttgccttcttactgcgggaggttcctcaaccccaatctggttggaaaataaaacgctttgtctccacaaccacaccccccacagcacccccacccgctctcagtgtgtgttttatacgtgtgtatatctcaaccccctacagtagccaagagaaagcagctagccaatgagagagcccagtttcataaaagctgctctctgattggcccgatgcgaaagggcactgggaacaaagaaaagtccctttcaggtatagaggctgagagcttcttttgctccactccccctgtgtgtgtgttgtgtttcagtcctgatttagtgttgcagaacaagcttgttgtgtgtgtgcaccagggggatttttgttttgctttttttaaattttaatttttgcttttataaaaaatacacaggacggtctgtgacatttgatggtccatcttctttaataataaatttgttgaagagattataatttccaaaataaagcggctgcaaccaaacacattcaatgcagttagaaggaaaaggtcaactcgatccaatacagaccgtaagtacggttgcgtggtgtgtctctatatagcacttagcggggacttcatgcaggggaatgtgcgagttttatgcatagaaatgaggaactagttacagggtttggcttttgcatttagaacaacaacccaagaagggtgaattttattcagtggagggtgaagcatttgtaacttcacacaaattaagcttgactgggcactcggggtaacttagaggaaattagcttttgggctctaacccaaaggagaataaaagtgacacagttgcatatcctggtctgcagtgtcaattctctagctcaccttactccctccctcttctgtcctagctgggcagacccccctcccaaagcgatccaggaaaatgggggcaagggcagaacaagccgatttctgtctcctgtcagatcccagtgcccgataatttaatattaaacaagggaatagtcactcattacatgtaatggttataattaccattcgccatctccttaaaaaagcaagcaacaaaaataccattaagagaaaaaataaaagccccacccaacccaaacaaacccacaaatagtaacaatggtgtatttattacaggaccaggctggggagcaagcaaaaggtttttctttgtttaatacatgaagtgggggtccctaaaatccaagtagctcggnnnnnnnnnnnnnnnnnnnnnnnnnnnnnnnnnnnnnnnnnnnnnnnnnnnnnnnnnnnnnnnnnnnnnnnnnnnnnnnnnnnnnnnnnnnnnnnnnnnnnnnnnnnnnnnnnnnnnnnnnnnnnnnnnnnnnnnnnnnnnnnnnnnnnnnnnnnnnnnnnnnnnnnnnnnnnnnnnnnnnnnnnnnnnnnnnnnnnnnnnnnnnnnnnnnnnnnnnnnnnnnnnnnnnnnnnnnnnnnnnnnnnnnnnnnnnnnnnnnnnnnnnnnnnnnnnnnnnnnnnnnnnnnnnnnnnnnnnnnnnnnnnnnnnnnnnnnnnnnnnnnnnnnnnnnnnnnnnnnnnnnnnnnnnnnnnnnnnnnnnnnnnnnnnnnnnnnnnnnnnnnnnnnnnnnnnnnnnnnnnnnnnnnnnnnnnnnnnnnnnnnnnnnnnnnnnnnnnnnnnnnnnnnnnnnnnnnnnnnnnnnnnnnnnnnnnnnnnnnnnnnnnnnnnnnnnnnnnnnnnnnnnnnnnnnnnnnnnnnnnnnnnnnnnnnnnnnnnnnnnnnnnnnnnnnnnnnnnnnnnnnnnnnnnnnnnnnnnnnnnnnnnnnnnnnnnnnnnnnnnnnnnnnnnnnnnnnnnnnnnnnnnnnnnnnnnnnnnnnnnnnnnnnnnnnagactttcagcttttttttttttaaagaccagatcagtattttcttgatacgcttgtcaccatttttgttctcacgacaaccaattgagcccttgatcctcacgtgatgtgaaaggcttgcactgtaacaaaatcgctccttttagatggttggttgttactaactcgcccatccccctctcccagccccgacatttccagcaaagcgactctccacttccaatccatcaacaattcattactgcttttagcttccaaacgccagctaattaaaaatactaagccaagctccggggccatctgactaaacacaggaggggctgggcgaagggagaggagagaaaaaataaataaaagggagacacaccgtttgctgcgagtataagagggaaaaactcccgaaaagggtcgccttaaaaaaaaaaaaaaagaaaacaaaaaccttattttgactctaattatcgaattaccacatgactggctgacctgagcgacagaggattccactcccctcgggagctatactaggaactcagttcctttttcttaaaacaacataagacaggaaaacatcacatcctttaggtttcgaagactgagcccattttaaacgccgttattttccccaccccaccgccccaagccccccgccccccgccccgagcgaatgctgttataactggtttatcagctcactgaatcatctgctgtctcctcctccacacctttctttttctcttcttgcccagtttctcatcccaccctttcttctcctcctcctccctctactccccccctccttttctcttaagttagttcaagaaatcaaatctgtcaggacgggcggaaaaatgccacttcccgactaacaggcggaatccagcccagattttcagtcctttcttcttattctttcttccctttcactaatttatcccgatgttagcacattctgtctcgttactagcggacgcctgtaggtttgctacatgggatcattactgatcacggtgactctgaagtctggaactgaaggcggaatgagaagttgggaaaacttttttctctaaactctctgttttttaaaaaactattattctcgatgcttgttaagaggaaaaaaaaacctttggtgcttctgttgtgaatgtgaaacattattttccagctgtacagtgacacattttttttaaggagaaaaggactgattcgtttgccaaaaggggggtggggaggtggaataatgttatcgagtgattattctggctgagatgtgttatttggtttcttccttcttgatcatttggtgtttaagtaaaatgaggcacaggcttgtttgccgagtggagtgggaaaggcattttgatttgctggcctaattaaaaaatgataaaggattaaaaggtaagcaatgtctgtgtgtgtgtatgtgtgtgtgtatgtatatttatttatttttttcttgacaatcaactgttaaaaaggggctgatccctttaaaaaccgttttaactgctctttgtcaaacacactcatttgcggtcattgaggccaccttggcgcagatcacttaaagtgtatgtcttaatcagttttctgtacagtcagtagcaccgtatttaagagagtgagcaattctctgacctaggaatatggtagaattgtttaaatgtatttttttctcaaaaggcaggtatttaactttttatataacactgtcttttctagagagaaatgctcttaaaagacatgcatatttcaaaaaagaaattgtagaagctgtttgggaaaagaggataggagggaggtatgtgtgtgtgttgggggcagttattggttgttttttctgttccttactaggaacaaaaaacagattgcccagacaatttgtaaaaagaagtactgaaacctaaattagaaataaggaaaatttagcaacattctattctgaaaactagcctcagaacttccagggtctggtcttctaaattgcaagatctaggacatgtttagggatgtttaaagctgtgttcttccttcttgtctgagtgttcaggctgtgtttctggggttgagatatcacatgtgccagactgaaatcctaaactttaaaaaagaacacaaaaacctttctggacttgaatcagatccttaagataatttaatgcttttaaaaaggtgattatccttgtgttgttgataaagggattttctttttagctaccgtaagatgcttactgtcataggtttatttttcgggtttggttattttcctttaaacctgatattggactgtgaggacaatacatgagccaccttactctccatccttccctgtcccctttactgattccccaatactaatcgttttttattctggtaacacccagacaagaaatattcgacttttcccccccccttcacaggaaaaggtggacctggactgagggtgtaaaatccctggacacattcgtggggcaggaaaaagaagaggaagattagaagattttttttttctttgagagaaagcccagcggagataaacgaatgtcccctcatctccaaagaaaagttcatcggatttttattctagagagctcatcttcaggatgtcagtgaacatttctactgcaggaaaaggtgtggatccaaatacagttgatacttatgacagtggcgatgattgggaaatcggggttggaaatttaataattgatttggacgctgatttggagaaggacagacagaaatttgagatgaataattccaccaccaccactagtagcagcaactccaaggattgtggaggtccggcctccagtggggctggtgctaccgcagccttagctgatggcctaaaatttgcttctgttcaggcctctgctccccaggggaattcacacaaagagaccagcaaatcaaaagtgaaaaggagtaaaacttctaaggatgctaataaatctctgccttctgctgccttgtatgggattcccgagatcagcagcactggcaagaggcaggaagtccaagggcgccctggagaggcaactggcatgaattcagcgctgggtcaaagtgtgagcagcggcggcagcggcaacccaaacagcaatagtaccagcaccagcacctctgccgccaccgcgggggcaggctcctgtgggaaaagcaaagaggagaagccaggtaaaagccagagcagccgaggcgccaagcgggataaggatgcggggaaatccaggaaggacaagcacgacctgcttcagggccaccagaatggcagtggcagccaggccccttccggggggcacctctatggctttggggccaagagcaatggaggtggcgcgagccccttccactgcgggggcactgggagtggcagcgtcgccgctgcaggggaagttagcaaaagtgccccggattcagggctcatgggaaactctatgttggtaaagaaggaagaggaggaggaggagagccacaggcgaatcaagaaactgaaaactgagaaggtaggataaagtcgccttcctagatgtcctactctcctctgtgtgcatttgtgtgggtgtgtgggggtgtgcctctgtgtgccttacactttatgctttctggttctttgtgagatttctatgatatgcatcctttatattaaaatttgatatgggggagcctacttgggtgcagtgtttggctcttgcttctgctgtccttgctgctgctgctgctgctgctgctgcttgtgatgctagtgtttgggttcccaggtgggagggcctgagtgttctaagtaccttttgccctgtagatcggttcctcactagtcagcaggttgccgtgtgcttttaatagaaaacctgctcatgcaccctcttgactcttgtcctgctttcttccttaaggggaacagttttctattttaatttattcatcctagtattgcgggtaatgtgtccttaggtgcaaggttcaagttccctccctggagaggaatgtcgaggattcgaatttacattctacagacctcatcccttttattttttcttactgtctccaaaatagtactgtgaaaggatatccttgaatgagttcttgttattggtcctgaatgaaaccccaagcttgatgtgttgggtcattggtttcataactgcagaaaaactcgatggttttggtggctgttagcactctacccctgttccctcacccagttcttagctagagatttaagagtgttatcacttggatacctgactggggagctggacggctgctaagaagaataaaacagacttgctggactgatactcgtgaaatgtgaaaatgtagccaaaggggatgtagacggttgagtgaattggaatatagaattatgtgctgcatttaaacggtgtggatggttgatttagaccatttggacccttctccccttctttgtacaagtctatagttagacactgccttggaagaactgcctgccccgacacccacaccatgttttgctgcttagtcatagaccacattgactaatgtttgggaacagaaggtgttctgtccactaggcaggttgggaaggagttaggggtgtgtgtgtgatatttctatgaaattaatcttcatattaattctacaggttgtgccttgcagaagcaagctttctgtcatgtgggttgtggcatggttgttggggaacatccttattaaataattttgatttttttttgctatagttggcgattgggattgtaagtggtgataatatgtctttggagaattatttctgtgtaaaatggttcactgctacttaaacttttatattcttgtttttgtgttcaggatttaagttggagtataggagtaaagttttgatttttaaaagttgatagaggcacattaaggtgtagataatgccaaatttgcaaaatgcctccaaacgcttataaattcatatcctcttggtcaggtacattaatgaatataaatgaatttttgaaaattccgggttttgagtcttatatttaaatgtgtagtttcacattatttccgctaaaaggtgttctgaaatcttcttattacttagtacagtagggcatttacttttgttgccaatagtcttcaaattgcagttctaatctgctttaactatctagatgaattgccctaatccagtgctcacaatggctgtggttaaggagtcagagccatttgattggattcactggctgcttggaatgtgggaggtactgcccttttgcattccccttagccttttaatcttccagccaaatgttcacattcaacaattttgtttagctggcaatcggaacatttcagtatctaaaaggctgctgtcatggcaactgagattagagcgtggtgtcgtttctccagtttttgtgtgttcttttcactttccagtcacagaggaaactgggtgaagaatggaagaattaaattattcatatacatgcaactcatcttcagttagagcagtataaatgtgataaatatgaattacataaatgaagagcaaacaagtcatggtggatctggggtgggggagggaagaaagcacactgcaatttagattcacttctgatcctataccagaggaagctgtgccaccaatcttagccactggagttggcacaggggcccctcaaaggcttggatccaggggcttggatcctgtagtgttggccattctctgtcaagttgggcgttggctcaggatctcaaacattattccttaaggctttcctccccacccccacttcaccctgagaatgacttctcttaagaatgctttcatccttggcacacagaaatggcactcccttgcatgaatgccacccaggaaagtaactctaattccactaactagtggttgcatcaaattaggcatcaatttagaaaatgcttcctactgatgtgagaatacctatttagaaagtaaagatttagtaggaccagaagcttcacctgaaaaaatatttcaacactgaggttttttgacattttatacagtgttttaatttccttcagcctggcttgattatctgagtttgtgaagagtaagtgcctggagagtgaagattattaattttcagcaatcagatgtggctcgtgaggggccacatgtgaaaaccaaaggggggagtgtatgtgtgtgtgcatttttttttttttttttttttttttctggttggaaggttcacaggagattcataagacttgctgtcaccggttaattttcatagcatgcatgcttaaatgtctatttttggtctgtttattctgtttcttcactacacaaagtcatgtaaaacatgataaattggaccttatgaaacctaattaaatcaatgagtgttctactcctttatgtggaaaccacaagtatgttgtaaaagtcgccactcccttaatacgtgaacaaaatcaaaacatgccataattctaagatgtttgagctatatttctgtagcccattttgtggttaagccaccagtgacatgtctgaataagtagatttgatgggttggcttttggttgttaaaacctgcctctccaccttcccctcctttcttgtgaagcataatagccttgtattgaagctcttctttatgtatcctcctagccatcttacagttttgacttatcagatagggaggcattcagctgggctttataaataaacagtttatatgtaaagttgatgggtttatttgatttctggaaaattcaaaaatatatacaaaaactcaaaaatcctaaaagtggctgatacttaaacagaagtgaaaggcacaagaggtcatatagttgtgtctcaatacctattcagggaagagaattatttctgtaatatcatattgctttcattaagatggccctggtcataaaggtggtgtctacaaatggacctgtccataaaggatatcattcattttattttattcttttgtagagtcctttttatacttcaccagggaattctggcacattttctaagtgagtgtgagcagtttaagaacatattttgattaatgagttttgtggacattatgctttttttttttttcaaatatagtgtcccatatgaattctgcctagagtgtagtgtatctactgtgaaataaaagggcagaggggtcacttgctataattaaagaacagagtccattgttgtcggacagcaaactgttttgaaagctacataagaggtttagctgttaaagacgttggtaactaagggtggcgtccaaatcagcattgatccagctccttacttttctataggcctcctcacagggtgacagggctttttgagggagggggctgccctttccccaagaacacatggaacttaggtatttgtgtaatcagacccatcactgaattctgactttggtgtgtgaaatccgtttgctttgctggagagagaaggaatatgcataactgatcaagattgtcctataggagataaataatgttttgcaacttttaataactttgcaaatagtctgtaaaaaacggtggggggagggattgatagtccaaatgtcgtgaggttaagaatgctcttcaagtgaaattgcttggctgcaagatggttttaattagactgttataaagacttatttttcctaagcagcattttatagttagtaaatgaaatgtatgccgaaagtgctaagcagaaatctccctaaccacagaggtgttcaataaccagattcgaacaacatggaaagtaccatctgttcttcgttttcagcgtgaaaaagagggattgaatggctgcgatttgctccagtttcgacggtgtctgtgtgtgcgcgtgtattcttttttaatttaaaaaagttcacctggtacttcatagaaacttgaaattgcagtaatatgagcaacactgtgaaaacacatgttcctgcatttattttaaccagttccacttttatttaaaagatttccagaagcccagccattgaacactttataatggttatacagttcctgcaggcaatcacaatgagcggtcagcttttccaaagatctgactatttagtcagtacttgaattattctgtcaattttccccctggaggcaaggaggggaaaaggctctcacgccaactctggtcagcgtttatcagttaatctaattgtgtgtgatattgctgtggactggtgtttactatacatagaccttgctcttgttcagagctgtaatctaggattgttgataatgaggaaaatatccttttaaggaagggtaacttttgagtccttgacttttagacactaagaatcttggttctgggtttagttagagccctgggtaaaacattatccggcctttgtttgaggtcttttattgaagctaatgactgggcttgtgcctccctgagataaatgacattatctctgagtggcctgacaggaaacagacatgttaatggtgaagctgcggggaggatctgcttgggttctgacaaaagagtcgagaaagggacccctggttgtggtcattaacacataatgcattcttgctcttcctaagaggcccttgataattggaaagctattttagccacaagcacttaaatcataaatctactactcctagttctttgcattcttaaaagtagcaaagtaatgtgttttttgttaacaagtgtgtgatctggttttttaacgtggtggcagctctaggctgcctgggtaatgacgtgtgggagagctgcacgttgaattgtttttatcagttgagatccttctttgtctttcagcattgctcagccatccctctactttaataaagtgaaaagtgggtacagagctgaaaataagtcatttttatgcttgaagatgtcttgtgggagggggataaaatctgtttcataagatattgtgcagtgatttgaatgtgatgaaacctgacttggagtgtatgttttcaaaagtcatgagtataattgagtttcaatgcagtttaaactctctgcttcttgaaggaagataattgccacgttgaacacactctagaggtgtagaagaggtggcaggatcatgttattctattctttaatattaagcactggaagtttttcatagtaattactgcagcacaacatagttttgattgccagcactctgaacttgccagcaatctgaacatcaagggttttgcttgaatacaaaacactttattcctaaattacttgtattacattcctgtgttatatggaagtcagaactaaggaaatactgggctatccttgttagcaacatcttagggaaaataacccttcttcgctaggattcttgttgataaatgatcataatactctcctaatgtagtcattgaagattaaagggatggagaacaggtgagctccctgcctcagtgatgacttagactgtcattagagagtaagtaatatgtgtatgatattggtgccctgtaactggtatgtcataggtgtgtgtatataaatgttgtaactgcatatacagatgttggattgggagtatttagttagtatgggttttattctttaaaaaatgttcactgttggttttacgttccactctgttgcagaatatatggacctctccctctgtgtctaattctttctcccaactgcagtttcactagtgactacttgctccctgtcacaagttctttttaatttaagctcaaggttttggcaatgggaacaaagcctttgcaactgaatgaaaggttgttaaactattcatagttgattgaccagcagttgggctgtttgtaatgttattttgagagctcaaaggatatgcaacctcttgcatatccaaagtgagactttgctcctaaagctgaattttgcatatttgctaaatttttcttggaaatacctttgggaatgtagtagaaaagatgatgggttttgccttaagaactgaaatgatcacaaagcaaatacttatattttgctaggtctgtgggccttgaaccacagggatcccatctggtattcagaaggcttttccccccagtgaaactaaatgaaaacttaaaggtatatattgtaactgtaataaagaactcaaaggaaaaggtgtttcggttagaacaaataggtttgaaatgatgaacaaatacttctgtggatttttcaaagccacttactcttctttctcatttccaccccccgacctagtttgaatatcattcactgtgactattccaacccaactactgagctttctgcctcctgggaatcctcattgtcagctagcaccttaagaaaaatgtgtctgcagggacatttaggcatattccaataatgccacatgaatgtagcttttacagtttaaaaagcaagtaaaaatatattgattatattttgtgttgtacataatgatttcagaaagcagatatttaggttgtggaattggcttattatgctaaccagagagcagatggcatggtgccacagacgtataattttacttaaagggacttttaaggttttgatgtgttttcttttcctcttatttccctgatggcttcttttcattgaagggtaacttaaggagacctggtagcaattttactgccttcccctgacagtttgaaataatagcttggtctttggttgcactgatcttctaccagtcaactcgattctggtttttgtcatgtggcagagaatttttaaaaaaagtgttagtagtatgttttaagaagtggactcttttatatgcctcaattagcaacagacgacaaagttccaattggtcacactttcataaactcctggaagtcactgtttgtccttttgattaaagaaaactcctggtttagtttcttaggaaaagcacatctggccctctggccgcttttggtatacctttttgtccttcgcattagtcactgaaggttcaaaggttgtgtctaagttgttcctagttaggttagaaaattttccccatgctggaggaaatgtacttttttttttttaaactacactcatcatgtgtttggattcagctggcataaaagtaccttttgtttttgtacctagattttacagttttatccattattcacctcacacatcatcaggatgagttggaaagcatcttctaacttttttttccaaagcgtgcatagccagaccagtttacttctggatttcctgtcacttccttggctgattttatggatggctcatgttaaaaacaacaaaaatgtttgaactggaagggttgaagccttgggttttcattcttcatggagaactgtttatttgtgtgtggttcaccacagtacatggataatgctatcaaatctgtgctttattataggcttatgactagcacagccgcactttagttatgtgttcccgtgctttagttatttgccaattcttttgtgatggaaatgaaattagagctgaatctttgcaacgaaggggaaaataggcacaacaaatagaaactatcccttgagccagttaagaagtaagcagtggtgattaaacatgttttttttttttcaaaataagtgaaacacagaggaaactacttccttttagcttttctgtgaagttgtgtggaagatgagctcaacattttgagaagtggaggctgcagctagattttatccccttgtatcgtttgacatcttcagtaattgaaaagcgattcgtattcccaaatttttaaacttctctaaaggtgtaatttgagttaagtaatattgtttgtttctgcccccaaaagggagcaacatgatgttaaaacagagcagttgagcctctccgcatccaactccatttggtcaattgtctccatttacattccctgcccaaatctttcaccagcctttcccatgatgccgcagcagatgccagacactgaagtagaaagggagcagctgtttccaaacattactccattgctgtattatcctccacaatctgctttcttttgctctccccttcccccattcttaaaataaagaagccttctctccctttgacttttgcatcctccagtttatcagtgtgcaggttttctatcttatcagtcgcactggtttcttcagcaggtccctttattgttttcgctatgggagcagatggagggccctgggctcctgggggcgtggccgctggcacctcgggcccggggctgcgcgttcccgacggggcggcgggggcgtgcagccgggaacgcgcccttcttcccgccagggacccgtttatggccctgagcgctgtaaatctgtcagctcttcacgacgccttcacctctttcttcatttgctccagcttctagtttgacaacgttcccctgaggcagaattctaatctgcttccaattagttgcaaaatgtgactgaaatttccacattatgactgctgttttacttgcacgcacacatctagaaacaaattaatgctcttgaatatttattttttgagcccttggatttactttaagaggaagagtttccaactgtttggaatgacttccaggatttgcattttttcccgaaagccgaatatactgggtacattaaaacaaaacaaagcaactatggttgccccccatcacttaataagacttttccatcttttcaagatttcccaaaatgtattgcatatgtttaagtaatgcaaataaattttgtagtatttctaaaataaaacaaggatgtttggctaaggaacggtccctatgcagtgttttaataaaagagaaatatacagacacatttccttctaaatatagtttaagtatactttggccaaaacacaaagacttttgttccacacgtttaaattctttcattcaatattcaaaagctgtaaacccaaataaacgaattgagtgattaattggcttggcacaaatctaagggtagcattaaataagttactgtgggcattaatgtgtacccaagtttttgtgtaggtctctggagcacaccctccctcagcgagcggctggggtggttgtactgagatcagtatagtaggtgggttcctgtgactttggtcttcccagtccctccgtacgccagtgttaggagaatggacctagttctgggcttcggggtggttctgtatagagggtgatcatcacttatcaccccaactccatttcctctctttcagtgattttttttaacaaagatgttgatccccctgattatatgtaaatattagagttgtttaaatcttggttgctgagaatgtcaagttaagacaaccattttattacttgccttaaagactgctttctcaagtactggagaattttagtaccaaggcagtggattagtatttgtgaaaaggtgctactcttaatgtaaacggcgaaatttactggtgccttttatagtagaatttagtcctcaagcatcttggcagattgatatcaacagtaataatgggctttaaagaggtgtgaaggattttattgatggtaaagtggttatgttgatcgcatcactgtgtattagtttctgagtaagaactgcacatgtaaatggatgcatgagttttttttaaacatctttatcatatataatcataaaaccctatattgattgatttctaatgctcttttatgtgccactttgaatctctaatcaggaggtggagaatttatttcattttgtttcaacaaaacctattcaaaattatttcttagatatatagggtatatgttatttaaatggttttctaaaaacttatttttagatatgccagaattccacaaaagaagtcggagtgctctttgtattgcttcctttcttcttactcaatgactagtagtagaaaaaaacagccagattgaaatccttaaaaatttaaaatgttgggccttcagattgcagagacctcctgggttaaaaaaatgaaaaaattagtggccctgtagtgaaatgctcacaatagcaatgattgtggtagcccctcaagtcctggggttcactaattaccctttaatgaggtcagtctgccccggctttttccctaccttgggaggaaaagcacacaagacagttggagttcaagtggatcttgctgtatttgcaacttagcataactgctttgaaagcccccagggtgcttaattggggcctgggcatttttgtttggggagagactacacacagctcctcattgtgcttgtagaagccactgtgcatcttggaagcattacatgcttttgttgatggtgcatagttttataaactccaaatgagcttattgctttttaaccattgggagagctaaataatggaagaacctagaagtctttgggttgggtagccgccaaacagaaaaaaaaaaaaaaaaaaaaagagagagagatagagagaatgaatggtttaattggagagcaaaccatttgtttgcagattaagatttacttggtcgccaaatcctatggatgaggtgaaagaatgaggccgtaaggtacagaaattgaatgcccagtgttatgttttgtgatcatgctcagctgtttttaccctttttttttttcacaaagaaggcaaaagaagaatgaattgtttaatggagagaactgcctagccaagtgcatcttttaagctgtatagagggagggaagaaggtggggaggcagattatttctgtgctccctggtcaggaagcaaaactctcaaggttcttttagctgagagaggggctagaagacttgctgaatcttcctgtttgctcacttaaggaggaatggtggtggtggagctagggagtaaaaagtagaagaaaggtgtgtgggaaagagggtggttggggtagagcttttgttgcaagggccctagacaatgcattctcttgaataattgggaccatttatagaaattccccatgatttcattagttagtagccctgtttctgaatagaaagggactctccagcaacagcagtgaagtggtacagcagttttggagggggaaaagcagttgcctggcagcctgaatgtcagtatgtcttttttttttttttttgaacaaacaaaaaaacccctttcctaaggactagaagaccagaaatcatggcatttgtccatgttgtagttgcagtttgtccttctaatcttattgtgaataaataggtttctggaaagacctagcattattttctagaagtatcattctaaacactcctcaactcactgtttttatttttactttaatcttgggagtgaaaccctttatcttaatctgctcttttgtgtataaactgtctctctttttgataactcaggatgcatgccatgaaaaagcccatttcttctgtaacattaaaatcatttgtttattgatgcatatttgatacattgaacttttaaatatctgaattggctttaggtgatcttgttttgtttttctcctagctttaagttctggtattatttattattttggtatcatgatccttttgaaatggcatgatttttgaatccaaataatggctgatagcttcattttatagatctatttcttctgaggggcggtgaacaagaggattgtaggaattggggagcaaagagagtgtaaaaaattaggtctaagtagtttcagttttgtcaaactgctacttactttttaatgtgccattgctcattcctgattctttcctgttaatattttccgtattagtgaggaaagagactggattttacttctgttaatgtctaaaactccaaactttttttttgttttttgagatggagtcttgctttgtcgcccaggctggagtacagatgtggcacgatctcggctcgctgcaacctccgcctcccgggtccaagcgattctcttgcctcagcctcccgagtatctgggattacagacacccaccagcacgcctggctaattttnnnnnnnnnnnnnnnnnnnnnnnnnnnnnnnnnnnnnnnnnnnnnnnnnnnnnnnnnnnnnnnnnnnnnnnnnnnnnnnnnnnnnnnnnnnnnnnnnnnnnnnnnnnnnnnnnnnnnnnnnnnnnnnnnnnnnnnnnnnnnnnnnnnnnnnnnnnnnnnnnnnnnnnnnnnnnnnnnnnnnnnnnnnnnnnnnnnnnnnnnnnnnnnnnnnnnnnnnnnnnnnnnnnnnnnnnnnnnnnnnnnnnnnnnnnnnnnnnnnnnnnnnnnnnnnnnnnnnnnnnnnnnnnnnnnnnnnnnnnnnnnnnnnnnnnnnnnnnnnnnnnnnnnnnnnnnnnnnnnnnnnnnnnnnnnnnnnnnnnnnnnnnnnnnnnnnnnnnnnnnnnnnnnnnnnnnnnnnnnnnnnnnnnnnnnnnnnnnnnnnnnnnnnnnnnnnnnnnnnnnnnnnnnnnnnnnnnnnnnnnnnnnnnnnnnnnnnnnnnnnnnnnnnnnnnnnnnnnnnnnnnnnnnnnnnnnnnnnnnnnnnnnnnnnnnnnnnnnnnnnnnnnnnnnnnnnnnnnnnnnnnnnnnnnnnnnnnnnnnnnnnnnnnnnnnnnnnnnnnnnnnnnnnnnnnnnnnnnnnnnnnnnnnnnnnnnnnnnnnnnnnnnnnnnnnnnnnnnnnnnnnnnnnnnnnnnnnnnnnnnnnnnnnnnnnnnnnnnnnnnnnnnnnnnnnnnnnnnnnnnnnnnnnnnnnnnnnnnnnnnnnnnnnnnnnnnnnnnnnnnnnnnnnnnnnnnnnnnnnnnnnnnnnnnnnnnnnnnnnnnnnnnnnnnnnnnnnnnnnnnnnnnnnnnnnnnnnnnnnnnnnnnnnnnnnnnnnnnnnnnnnnnnnnnnnnnnnnnnnnnnnnnnnnnnnnnnnnnnnnnnnnnnnnnnnnnnnnnnnnnnnnnnnnnnnnnnnnnnnnnnnnnnnnnnnnnnnnnnnnnnnnnnnnnnnnnnnnnnnnnnnnnnnnnnnnnnnnnnnnnnnnnnnnnnnnnnnnnnnnnnnnnnnnnnnnnnnnnnnnnnnnnnnnnnnnnnnnnnnnnnnnnnnnnnnnnnnnnnnnnnnnnnnnnnnnnnnnnnnnnnnnnnnnnnnnnnnnnnnnnnnnnnnnnnnnnnnnnnnnnnnnnnnnnnnnnnnnnnnnnnnnnnnnnnnnnnnnnnnnnnnnnnnnnnnnnnnnnnnnnnnnnnnnnnnnnnnnnnnnnnnnnnnnnnnnnnnnnnnnnnnnnnnnnnnnnnnnnnnnnnnnnnnnnnnnnnnnnnnnnnnnnnnnnnnnnnnnnnnnnnnnnnnnnnnnnnnnnnnnnnnnnnnnnnnnnnnnnnnnnnnnnnnnnnnnnnnnnnnnnnnnnnnnnnnnnnnnnnnnnnnnnnnnnnnnnnnnnnnnnnnnnnnnnnnnnnnnnnnnnnnnnnnnnnnnnnnnnnnnnnnnnnnnnnnnnnnnnnnnnnnnnnnnnnnnnnnnnnnnnnnnnnnnnnnnnnnnnnnnnnnnnnnnnnnnnnnnnnnnnnnnnnnnnnnnnnnnnnnnnnnnnnnnnnnnnnnnnnnnnnnnnnnnnnnnnnnnnnnnnnnnnnnnnnnnnnnnnnnnnnnnnnnnnnnnnnnnnnnnnnnnnnnnnnnnnnnnnnnnnnnnnnnnnnnnnnnnnnnnnnnnnnnnnnnnnnnnnnnnnnnnnnnnnnnnnnnnnnnnnnnnnnnnnnnnnnnnnnnnnnnnnnnnnnnnnnnnnnnnnnnnnnnnnnnnnnnnnnnnnnnnnnnnnnnnnnnnnnnnnnnnnnnnnnnnnnnnnnnnnnnnnnnnnnnnnnnnnnnnnnnnnnnnnnnnnnnnnnnnnnnnnnnnnnnnnnnnnnnnnnnnnnnnnnnnnnnnnnnnnnnnnnnnnnnnnnnnnnnnnnnnnnnnnnnnnnnnnnnnnnnnnnnnnnnnnnnnnnnnnnnnnnnnnnnnnnnnnnnnnnnnnnnnnnnnnnnnnnnnnnnnnnnnnnnnnnnnnnnnnnnnnnnnnnnnnnnnnnnnnnnnnnnnnnnnnnnnnnnnnnnnnnnnnnnnnnnnnnnnnnnnnnnnnnnnnnnnnnnnnnnnnnnnnnnnnnnnnnnnnnnnnnnnnnnnnnnnnnnnnnnnnnnnnnnnnnnnnnnnnnnnnnnnnnnnnnnnnnnnnnnnnnnnnnnnnnnnnnnnnnnnnnnnnnnnnnnnnnnnnnnnnnnnnnnnnnnnnnnnnnnnnnnnnnnnnnnnnnnnnnnnnnnnnnnnnnnnnnnnnnnnnnnnnnnnnnnnnnnnnnnnnnnnnnnnnnnnnnnnnnnnnnnnnnnnnnnnnnnnnnnnnnnnnnnnnnnnnnnnnnnnnnnnnnnnnnnnnnnnnnnnnnnnnnnnnnnnnnnnnnnnnnnnnnnnnnnnnnnnnnnnnnnnnnnnnnnnnnnnnnnnnnnnnnnnnnnnnnnnnnnnnnnnnnnnnnnnnnnnnnnnnnnnnnnnnnnnnnnnnnnnnnnnnnnnnnnnnnnnnnnnnnnnnnnnnnnnnnnnnnnnnnnnnnnnnnnnnnnnnnnnnnnnnnnnnnnnnnnnnnnnnnnnnnnnnnnnnnnnnnnnnnnnnnnnnnnnnnnnnnnnnnnnnnnnnnnnnnnnnnnnnnnnnnnnnnnnnnnnnnnnnnnnnnnnnnnnnnnnnnnnnnnnnnnnnnnnnnnnnnnnnnnnnnnnnnnnnnnnnnnnnnnnnnnnnnnnnnnnnnnnnnnnnnnnnnnnnnnnnnnnnnnnnnnnnnnnnnnnnnnnnnnnnnnnnnnnnnnnnnnnnnnnnnnnnnnnnnnnnnnnnnnnnnnnnnnnnnnnnnnnnnnnnnnnnnnnnnnnnnnnnnnnnnnnnnnnnnnnnnnnnnnnnnnnnnnnnnnnnnnatgtatatgtatttatcatatatcaattgctgtcatatttgattattgagtcttcagcatttaaaaatggctaaggaacgagtttgaggttgtcttgcatggtaacgaagataagcagaaggccagacatgttgggatagtgattttcagattatggaaaatctgcgtaagataggtcaagagaaggtgcttcctgtggaggagtgagtactgtacatgtctgtgaggccattattattgccagcagcatgggagagctagataaacaaaatgtcagccaccccaaagcagaggtgatctttgctttgatccccttggctaaattcctcctgaaaatatctttctgatatgttcctatccacctaaagcctatttttttctccatttatcaagagctttgccctccaataccaacctattgaatgacccttaaggtgattttaagatagcacctcaatcccatcgtgagtcgacttttcaagaccaaggtatggaattcaaaggtagggactggtctgataggaggagaggcataagagctttcctggtgtcttaaatcacacctttgggcagtcatctcttctgcctatttgtaaagctgtgtttggagagaacctcctttacagatgtttcttaagatacttggggcccggcacagtggctcaccccctgtaatcccaggactttgggaagccgaggcgggcagatcacctgaggtcgagagttcgagaccagcccgaccaacatggacaaaccctgtctctactaaaaatacaaaattagtcgggcatggtggcacatgcctgtaatcccagctacttgggaggctgaggcaagagaatcgctttaacccgggagatggaggttgtggtgagccgaggtcatgccattgcactctagcctgggcaacaagaatgaaactctgtcttaaaaaaaaaaaaaaaaaaaaaaaggatacctggagctggcaacaagatacaactgatgaggctgaagctgtatctgatgtgtgtggttttttttttttttttttggtctgatttttttttttaagggacttttataactaagaagtgaagttcaataaggacctaataagaaaatgagatcttgaggattgataccatcttgagagtagtatatatgttatatatttcttttttccatatttgttaatatctttttacatatacattcatttctagaatttctgcatatttctaacatacccaatgaaattgatttgagaaagagaaataatagaagtagtatgcataaactgacaaagatactgtgagggcagctatacaaggtcaagaccaactggaatcccaaggacagaagtcagaaagataatggatgtgataaactcagtacagcctgtataagcagtgatacttttttatttcctctgaagccttgacttggggagaggagagggttttagagttgacagagcacagggttgtgaaattttctattgaaaatcctggcacatttagaacacagtggagaagaaatttactggaggagatttgcccacttgttgcaaaactctgttgctgtcactgtaagacctttggtgctaggaactataggtaaagggatgaagttgaagtgtaggatctcactgtgattttgaagctctgttacagggtagaggcctgtgttaagtacaagcttgagatgggagagaaagagcagatacagcaactgatgctgaattgagagaggatccaaagcccggaatcccagttggttggatgtttgcactttttttttgtctggagatgcttcctagtctgtttcttgaccgactgcacatgctgttaaatccactcaggtaacacatatgtgttgggcgcacagcccatgtccagattggactcggagttgggcagaggccaggtcatgcagggccttgtaggccatggtaaggaatttggattttagcttgaatgcgatgagaaaccatttcagaattttgagcaaggcagtgacttttttttttttttttttttttaaacaaatcttactgttgactgttgtatagagaattgactgtagagaggcaagaagaggacaagggaaatcagttgcaagactttttcagtggtcctggtgagagaagataggcttctttggtaggcatggaagtggtgggaagtggcaagaaatggtcacgttgtcctgagataatgaggatatggatatatgtggagttgtgaaagaatgagaattaaggaaaatacctggattttggaggtggatggaatcaagagttgtgactcatttttgatatatcctgtggctgccaagtgattatggtccttccacaggaaggccagggctggagacacctatgggcaaataggtgggctttaaagttattgggctggaagaggtcacctctagagttagttccaatggaaaagactagggcccagaggtgggctatggagcagtaggagccagcgccgtgtccattgagggggaagaaaacccagccagtctggtgtttctggaaagcaatggaagaaattctagcaaggaaggtgtgatcagctgtgtcaattgctgccaagaagtcaggttaaaatgagactcagaattgatttttggtgacattagcacaaatcgtttctggggtaaagggtagtgatggggaaataaaaagtttgattagagtgcttggattttttgtgggaggtgagaaaaaacaggacactatgaatatagcacccttttctataaggggcaaagagatcagggaatatctgtcattttttaaagtggagaactctcacagcctgtttgtatgctgatgggaatgatgagagaggggtggagaagagctgtccatactagagagagagaggagacagtgtcctgaaatagggtgcatccatgggtctctggagctaggacagtcctccattataacaggagaaagtcagagaatatgtacagatttaggagtggtacagttttttctaggaaaaaactagagcgttttcattttatcactgtgcagggtattgttgctgtgttaagggattaaaaaaaatacacatgtcatagacagcagttaaatattcatttccttgcctcctcctacagtttagaagctttggccattttgtgttctgacagcaaaaataattagaatgggggaggtataaaagcaggtctcaatctgttctttcatttgttcattcctttattcattccttactttgtttacccagcaaaaatacctagtaaaaatatttcctcagcaaacatttttttgaatgtctattatatgcctagcacagtctgggtcctggaggtacagtagtgaagaaaccaagtctctgctatcatgaagcttatattcaaatttattccagacaaataaatatattttggttggcgttacgtgctataagggagaatcaagcaggagaaggtggtagaaagagatggtggaaaagaagaattttatttgtttatgtttgagtagggacctgagtacagttaggagccatttggcccccttgtggagggaactttttagacccaggacctgtgtacaatccccccgggggtcgaggagagggagagtgtatttggtgtgtttgaggagacaccagagtgactgaagctggatgagggagagaggagagttccagaagatgaaatctaagatggagcttgaggccaggctccagagagccttccagaaccaagtaagactcagaaaggtgggagagactggggggctttgcgcagaggagggacaggctgtgacttaagttctaaacgtatctcagtgtgtgggaactgatcctaagcttaacctctggcttttgatttcattctcatttctcagtggttgagggagatgatgttaccccgtgtgaattatattaactgatttcacatgcaagatcgtaaatactgagtcctttttcagagagtggacaaaatggtacctttctctgaagacattaattgaaagagtattactttccccagagaacgtattccaggtgtctctggttgtgtacacacacacacacacacacacacacgtgctgttgaattaatatagctgatgtttactaaagttacaaataacaaaaaattggaaatgatgaggtaataatataaatagaaatgccagtctttttttttttttttttttgcactctttgcatactccctgggtttgaccatgtctcctacttaggagactggtccagagccctgagaaattagttgcatttattactttttgactattttttttaaattaaaaaaagaggtcagaaattggtaaaagttcaaactacactaaaatgttatataatgaaaagtaggttttacttcccccttatgccccccagactgttccctagagccaattattttgaacagttttgtatgtcctcgaaatagtccccgtatgttcaagaatatatatttatatttttgtccccttatacaaatcacagcatattaaagaaactgatctgcacctttaaaatgttcctttgaacatctttgcacatgtgtgtttcaaaatttaattgccccccaacttgattgcatccgtttgcattcccagcaatggtggaacatgaattgcctgtaatttctacaatttaatactgtgagttataattttctggctttaatctgtgctaatctgatagtaatctattattttaatttgcatttttcatgggtacaagccattgtatttattttcctaaatattgataatttataacctttgattatctagtgagttgttggccatttcttattttaaagtatttcagtgtataataattaaatatataattttttcatgtgttttgcaaatttttttatgtgctttgcaaatattttttcccatctcttcatttgtcgtttgattctgtttatgctgttcctccccctactccgtgcaaatatcttaaactgtatagtcagattcattgattgatggagtcagcgtctcactccatcaccccaggctggagtgcagtggcacgatctctggtcattgcaacctctgcctcctgggttcaagtgattctcctgcctcagcctctcgagtggctggaattacaggtgcccaccaccatgactggttaatttttgtacttctagtagagatggggtttcaccatgttggctgggctggtcctgaactcctggcctcaggtgatccacccaccttggcctcccaaagtgctgggattacaggggtgagccactgnnnnnnnnnnnnnnnnnnnnnnnnnnnnnnnnnnnnnnnnnnnnnnnnnnnnnnnnnnnnnnnnnnnnnnnnnnnnnnnnnnnnnnnnnnnnnnnnnnnnnnnnnnnnnnnnnnnnnnnnnnnnnnnnnnnnnnnnnnnnnnnnnnnnnnnnnnnnnnnnnnnnnnnnnnnnnnnnnnnnnnnnnnnnnnnnnnnnnnnnnnnnnnnnnnnnnnnnnnnnnnnnnnnnnnnnnnnnnnnnnnnnnnnnnnnnnnnnnnnnnnnnnnnnnnnnnnnnnnnnnnnnnnnnnnnnnnnnnnnnnnnnnnnnnnnnnnnnnnnnnnnnnnnnnnnnnnnnnnnnnnnnnnnnnnnnnnnnnnnnnnnnnnnnnnnnnnnnnnnnnnnnnnnnnnnnnnnnnnnnnnnnnnnnnnnnnnnnnnnnnnnnnnnnnnnnnnnnnnnnnnnnnnnnnnnnnnnnnnnnnnnnnnnnnnnnnnnnnnnnnnnnnnnnnnnnnnnnnnnnnnnnnnnnnnnnnnnnnnnnnnnnnnnnnnnnnnnnnnnnnnnnnnnnnnnnnnnnnnnnnnnnnnnnnnnnnnnnnnnnnnnnnnnnnnnnnnnnnnnnnnnnnnnnnnnnnnnnnnnnnnnnnnnnnnnnnnnnnnnnnnnnnnnnnnnnnnnnnnnnnnnnnnnnnnnnnnnnnnnnnnnnnnnnnnnnnnnnnnnnnnnnnnnnnnnnnnnnnnnnnnnnnnnnnnnnnnnnnnnnnnnnnnnnnnnnnnnnnnnnnnnnnnnnnnnnnnnnnnnnnnnnnnnnnnnnnnnnnnnnnnnnnnnnnnnnnnnnnnnnnnnnnnnnnnnnnnnnnnnnnnnnnnnnnnnnnnnnnnnnnnnnnnnnnnnnnnnnnnnnnnnnnnnnnnnnnnnnnnnnnnnnnnnnnnnnnnnnnnnnnnnnnnnnnnnnnnnnnnnnnnnnnnnnnnnnnnnnnnnnnnnnnnnnnnnnnnnnnnnnnnnnnnnnnnnnnnnnnnnnnnnnnnnnnnnnnnnnnnnnnnnnnnnnnnnnnnnnnnnnnnnnnnnnnaggcaaaaggactaatgatttgcagctccagccctaggaatatttccagccggtaaatacacttactgatgtttcccggaatcttagggcagaaacatccctgcacaaatgaattgcttaagtagtaaagatgagccatagctttgcttagttagccattttggtttagtagaatgtagataattgccatggaggcagggggaaacgttttgggagtgtataaagcatgaagttgtaagtattactgctataggtctgatctatgcaggtcatctcttctagtcagctgggcttcagaaaattgccatgttgctcttgtgctctcagtgtggaggtagccagtaagtcctgctgatgttggccacatgtggcctttaggtagattgttccctcctgcagaccttttactcttgatttctacctgggtcatgatccagggagagaagctctagaactgggaattgggggactggtcccacttgatgatttggctttgagttccttttttttttttttttttttttttttttttgagacagagtctcattctgtcgcccaggctggagtgcagtggtacgatctcggctcactgtaacctcggcttccttggttcaagcaattctcctgctacagccttccttccgagtagctgggatgacaggcgcccgccacctcgcctgggtaatttttgtatttttaaagtagagatggggtttcaccatgttggccaggctggtcttgaacccctgactcagacgatccacccgcctcagcctcccaaagtgttgagattacaggcgtgagccactgtgcccggcctggctctgagttcttttatgacccttgggcaacagctactggctctgagccttagttgcttcttggttatgttgtctgactatctttactgttccaaaacagttgtaatttcccccatttctatttattgctctggaaacacatgtcgtttatctacacttttgctgttttgttctgtggtgtgtgagcgcatgtttcccctgccagcctggaacccctgagggcatggatgccatcttatttgtttttatctccccagcgcctagcactgagccctcttacaggaaatgctcagtcaatatttgttgaattggattctcttttagtagggttacagaggaaaaaagagccttaaaactgtctccatggggtccacatcttttgtcttttcttccatgtagagatcgttggcaaaaacattgatgggaattatctatcttgcatttatgtgacatttttaattctttaacagtattgtcatctgtataatcagttatattgcacctggtttccccagtttggtagagcatgcctattgagttttaaagaataaagatgacttattcagaagggtcatgctctcagaataacaaactgtcatggcatcctgtttgcaaaaatctgcattaggcagatttttgtctgatgatttctttgttatccacatgactttcagggctaaaatgaaatgctacttttttctttaagtcattattcaaaagtaagagagaagcgtttattataacatatagcttaggtgtgaccttgggaaagttgtttaaaccaagttaatgatttaatttgcggggtgggggtgggggagaagataaagaaaaaggaaaaaaaagccagcccaggagttgggagtgtaattagatattatgagctcaggcatgaatttggcccctttatctctgttgaaatttgtgtaagaacatgaagtgcggcccattctgacactttaatcataggtcattcatagccataattgttgttgaaaagaacagtggttggatttatttttacctggaagttgcccgttaaacacaacatgttattaaaatttatttttccaaaaagtatacttttcagtatacatttaacagattgaagctatacatgtttaccatgaaagtctgtttcacctgaatgaattccggtgttgctgtgttagatagctatagcatggttgtggtttttgtagagcctctactaagttttatatttcttaccattcacaatttttgccagaaaagtggtagaaaaaagaaacttcataatcagaaaggtgatagagaaacctcatagtcagatatattataaaagaagatgatgacacctattaacaagaaatctaacatcttttgtggtgagcttctaatacagtatcaacaaagcctaggaagagtttcctttttgagacaccccgcttgcccccaaatacattcgctcagataaattacttactgagaaggctatttcttttctaaaataaaaaatacaatgaataatttgtaatctctatacagtgcctggcatctagctgcccaaggaacatttgttgaattcagtagcaccttaaattatgtttaagtacttccaaagccatactcctgttggttgttttgttattgttgttgttgttgttttgacagacttcaacgatcataagagagtatgtcattgctctggctcacaggtgaagaaactgaggtttagaatgaatgcctgtgcttttagtctagcaaatgtttattgagtatgcattgtaatgaagaagaagcacagctcttgcccttgaatttgccactgggtcagttctcatctcctaggtaggttaggattttactgggcatgtatggactctctctccaggaaaaggaagagagaaagtacacaaacgcagaaacctttgcttctgtaattacaaggtttctgaggccccacaaatctttgaaccccagattaagaatctttgatccccacataaagaatctttgatttaaccattgcttgtcaacaagcccttgaattaagtaactgacttagggggcaaatagcttaactactgagaagcaataggaaccccatgcttctttttcctctcctaatgtttttcccaccaccccatgctgattttgaagtggtgaacaacaaatgaagtaacaggaaaacactttgtaaatatagtgttctacagatatgaatgcaaacaaatctgtaagtggcagggaaacccaggccacacatttcgcagtgtggcttatgttcatacattagggagcctgctggaaccccactaaactgttagttgccagctgtttggtttagtctgatcatttacaaaaatatagcaatcctcactggtgtgtgtgttaaatacagacatcactgaaacgaacgctgtgcctgtgacatacatttttgcaagtgctttctatgtatgggttgtcagagctagtttaattctaattgcagaaatatcagtgggatttatatctgtcttcttcaaatagttggaaagaaaaaatgtaagcacttggcacacattttgatttttgttctacattgaaaagaaccatgttaatttcaagaaactcattaatgtgcaggtccgtactagtagtttctcttagttacatattggtggaaggcagaagtattaaaaatggcatatatgtaatgagattttacaaaatttctgattttgagggtagagaaaaagccagtggatttcctattgtgcatgttaatttaaaaataatttaataatgactccatttgtttcattccagcattaaaaagggacatggagaaggcttgcctgtctttattcaccaaatagcggttttgcagacccttacaagttcccatatgctagtgaaaaacattttccaagaaattggcagcattgcactttgtagctgatgccagcttcttccttgggccaattcaacagagaagagaggaaaaaaaaatgccttgttttagtggctgaattactctgacaagctttcacatcgcccctcctcttattaatattctttttgatgtgagcttgtaaaacagaggattggctgttaatctccaagatctcaagggcttttggcagtggcccataattgatgtgttcacatggctgttgtctgactactaatgattagacagcagtgttatctaccagctaaatcagtgttgcttataaatcacacttgataaactgcagtttcatttcttcaaagagttcgtacaattctgcatactttgatggaagtgccagaggcatttcatgattctttgacagcttagattaggtttatttttcatttctgtttgacaaaatattagactttttaacgcatgtgaaagagaatttttttgttcccctaacaaggcatttaaagagtgctaagcagagaaagatgacctgctttcagtgggaagatgtacaagttgggatggcaggtcccagttttgcttttgctacctactccaaggtaaatggaatggggccatggcatctggtgccatgccactttgaaagaagaagagaagaggccaccagcaaggaagtttgcagaatgtgggcctgtgctcagattgtgacagggtggagtagtgagagagcaccaattgctcagccatgttatgtgttgagcccctgcgtcaaggtgtgattctgctttatagacaggcaagagaaagcaaaaaggatttataagaggaaaaggtgccagccataggattcattttcctccttcgctgcccctatagggacacttgcctggccacagacacacccagagtcccccatctgtccagaactctgtgtactgcagagatgaaaccaggttgcatgtcgcatgcacatggtgggctttgagaacttctgctaagttttgggtctttattggctacaaactcctgtggtcttgagttaactttcctcatttataaaactaaaacaacaacaaaaaaggactaaatgatatctaagctcattttattgctctttattttgcatgtccttggactgtattgtttcagagcctcaaaaaagcctttttgctaacattagttaatctttgcttaatttttgagatcaaatattagattgcaaagaaatggttaaatcagaatggtttgtgatttttaaaaaatgaatttatttatttatttatttaaggtggagtctcgctctgtcgcccaggctggagtgcagtggcgcaatcttggctcactgcaatttccgcctcttgggttcaagcaattctcctgcctcagcctccccagtagctgggattacaggtgcttgccaccatgcctggctaatttttttttttaatttttagtagagacagggtttctctatgttggccaggtgggtctcgaactcccgacctcaggtgattcgcccacctaggcctcccaaaatgctggggttacaggcatgagccattgctcctggccagcaaaaatgaattttaaaaatcacatttcttttaagagaagtttatataattttaaaatgtgtcagagggtaaatatttaatcaaaatttactttattttgagatggagttttgctgttgtcgcccagactggagtgcaatggtgtcatcttggctcactgcaacctccgtctcccaggttcaagtgattctcctgcctcagcctcctgagtagctgggattataggcatgcaccaccatggcccggctaattttgtatttttgtagagacggggtttctccaggttggtcaagctggtctccaactcccgacctcaggtgattcgcctgcctcggcctcccaaactgctggaattacaggcgtgagccaccatgcccggccaaaatgtacaacttttactcagaataaaattatgttctgtgaccaagattgggagtggggctaataataacttattaaagtttaaagagttattagagctctagaatgcaagaatgcaggagaatgcacttaacactaaagctacctgaaaaaatttcacctatcctaccctaccccactccaccaaaacaaaagtcatgtaagatttaactgagtacttccttttatatccagtacttttagaccttaaatctaggtggcaagtttatttcccaacttcctaagagtggctttgacatgagcactactttttcctagtatattttagggctgtaattaaaataagcactatagtcagggaataaatgtttattgataagtattaacattgatgaacaaaggtgcttaactaagctgcttatttaaatgacttgtggttgaaggaaatcccctctttttttttttattaaatgaaacaatttaaatttaagttgttttggttatggttattagattttaatgtgctatggaaaaatacccatgattaacttagagaagatagccattcagtgatttaaatagatgcttcatttagttttgatacgtaaagcaactatattagagtttctttcttttctttttttttttttttttttttgagacggattctcgctctgtcgcccaggctggagtgcagtggcgcgatctcggctcactgccagctccgcctcccgggttcaggccattctcctgcctcagcctccccagtagctgggactacaggtgcccgccaccacgcccggctaattttttgtatttttagtagagacagggtttcaccgtgttagccaggatggtctccatctcctgacctcgtgatccgcccgcctcggcctcccaaggtgctgggattacaggcgtgagccaccgcgcccagcctatattagagtaatgcagctataaaatatgagaaaaatgcattaaaagttatggagtatggttttcattacgtaagatatgtatgcataagtaagggctggttggtaatattaaaaataaaaataatgataacatttgaaaagattttttacaccacttaaaaataatattttctgtttaaaagcagtatacgtacatgtatctatgagctttatgaagtgtgtatattaccattatggcaaaaaataagcatgcattttttaattttagaagataatagtttttcttgactgatttaaatcatgattcaaatcaacttgatttaaatgtagtctagataatgctaaaactatattgcaggtgtttgtcaactagctagaaattattttaatggttaagggagtgcataatagaaataattattttgctgcagatatggcaagctctgtcacccgtggggtgcttgtacttggatattagacacatttgtaaaaataaataataaatattctggaaacgtgatgccaagagagcgtgatcctgtttaccacccctgctatccttcatttctttgtggcatcatttttttttgtgtgttaaagagtaaatgagctgacttggtaactgtgcaagaataaatggttaataacatttatttttatttacatttgggcattcttttgagaccattttcatagaggttgtttcatttaattcttgaagtacccctataaaatagctgaggaagcattttcatagagtccatttcatttgattcttgaagtacccctatgaaatagctgaagcaagcattcttaattcttatggatgttaacactagaagcagaagatcctgatctcattcttaggctgggatttctcctaggatgtcagcttttagaagaagaaaaatcactgttacctccaaataaaatcttactatgtagttggttctaaagaaccttaaatattcaattataaattcatccccaggtattttgaagtgtttcatttaatttgaaaactgtcatctggttttcagagactacagcagtatgtttttaatgtgttggtttagccatgtgacaaattaagcaagccctatgaacatgtgttactgagattggtattggcaaggacaataataactaacatttgttgagcacttatatgatagagatactacgacgggctttatgtaggatctcttgtttgatatgtctattacattaaatacaattaggtaatactataatctccactttataggtgaggaaattgaggcttagaaaggttaagtaaattttcaagattatactagtaagtaaatgatctgagattgaagcacagagaccacactcctatttattacactatattacccagttcaaaagcattagtgagacatgtgatgtgtgacattgacctgtcatcctctgtgagaagtagcttctgggactgatggtcttagttgtgcatccatgactagacttctggatgaaagaactccaagtttctaggagggcttgtttcatttctagtcctcaacagaatgtgtttgagaacttgattttttcatgtaattcattcacttatggggcaattaagataaaatatcctggttttcaaactgaaaatgttaccaaaaacacattgcaattacataggatggttgtttcttcttttgggaatagagacgtatcatagattgacaatgttgttttttttaaaaaagtttacttctttgtcagctccgtgaagggagggatcttgtctgtcttggttgtcattagcacccagcacaatggctggtataataaaaagatgttcaataaatatttaatgttttatgttatgactgcttaagttagaactggaatgtggctcctcatatctcttttggtttatgactcctaggtttttttaagagagttaggtagtagtaggtacatttattattatttttcattcagagatggatctatatgtttacttttaaaatctcctacacttctgtccactccctacttcctttttcacttccttcctgccctgttccaacatactgttaacttcccctccccctctccaccaacagatattaacgtccaagagtgaacctaaatgagctcttgaattcagtagagcaaggattggcaaattttttctgtaaatggctgatagtaaatactttaggctttgcaggccaagaggcaacatcacggatattatgtaggcacttggataacaagagagaaaacaaatttccacagaattttttaattgacaaaatttaaaatccaatgacaattattgagcacaatttttggtaatacagatctactgatgagaagtatgaaattctttttgtgggagagaataacattccacttaataagtgttcaaagttaatgtttgctgtcattacattgactgcaaaaattcatctgtagaaaacattcttagctttcaggccttaggaaaacagacagtgggccagatttggaccgtgggccatcatttggtgaccttttaactagactgtggactgagaaatccctaagcagggttacttgccctggatattccttctcataaaggctcattgctctaagactggaaagggaagatgttcaaatgggatttgtagggtggaaccaccttagggaactagtgaacataaagatagaagagtagtaagagagaagggaaggagagagagtttctctctgttcagggaccagtggtgattaaggggcatgtgccttggacgtcatgctgggaaggcccgaatcaggtggtgggtggggatagaggtttgaaaaagcttatttaggatccccattacttttgttatttagcttcctgaaatgaagggctcattatcttggccatcagtgacatacaaagattaagggacatggcatttgggatgggatctggtttctcaaagatcatgagtcatctaatggaaaaataggtgacttgcagcatggtgtggagtcattttttcacctaaattgaaacaaaaaggttccaggttggtgtaggggcaacactgtgaggctgccagtggctgtnnnnnnnnnnnnnnnnnnnnnnnnnnnnnnnnnnnnnnnnnnnnnnnnnnnnnnnnnnnnnnnnnnnnnnnnnnnnnnnnnnnnnnnnnnnnnnnnnnnnnnnnnnnnnnnnnnnnnnnnnnnnnnnnnnnnnnnnnnnnnnnnnnnnnnnnnnnnnnnnnnnnnnnnnnnnnnnnnnnnnnnnnnnnnnnnnnnnnnnnnnnnnnnnnnnnnnnnnnnnnnnnnnnnnnnnnnnnnnnnnnnnnnnnnnnnnnnnnnnnnnnnnnnnnnnnnnnnnnnnnnnnnnnnnnnnnnnnnnnnnnnnnnnnnnnnnnnnnnnnnnnnnnnnnnnnnnnnnnnnnnnnnnnnnnnnnnnnnnnnnnnnnnnnnnnnnnnnnnnnnnnnnnnnnnnnnnnnnnnnnnnnnnnccaggggtcacagagatgatctagaatgatctaattctgtccattcgcctgatagacgttgcccaacaggcgatcctctgcccatcctccccatcccaggccatgacactgtcaccaactgaaacagaccgctggggcacatcttgagtttgtcctcttctgccaccttcccgagtctgatctctcctccctatccccccaccccaccacgggtgccaggtcttcttggagtactgcaatggcttctttttttatgttttgtgatggagtctggctttgttgcccgggctggagtgcaatggtgcgatctcagctcactgcaacctctgcctcctgggttcaagtgattctcctgcctcagcctcccgagtacctgggattataggcacacacctacacccggctaattggtaatggtttcttgtcttccttcctccagtcttgccctgtctcatctgttttcccatggcttccagtgtgctttttaccacattaacaatcgaatccttccgtgcccctactttaaaatcctcagtgcccacttccaacttcataataaccccccagattcttagcctggcctgggctcttgtgaattctctgatattccagcctcagctctccctgtccctgccccacccccttggtgctcccacaatgccctgggcttaactgaccaccttcagctctgaccacatttggctctgcggccactgctcatctccccacctttggcacattgtggcacctggcaaaaacttgttggatgaaggaatgacttccccaacagtgaggcggcttaaacggcaacccatctaaaggggagggcctggggttaatacatgattcctgtcacacaaactaggtccttatgccaccttggactcacttgtggatttcaggacctctgcatgaggagttgaaataatagtcttcaagcatctaccctctcctctctgctttacttttactctaaagtggaatgccttagcatcttttcattaaaaagttagtttaaaaaatggtaaaatagtatatggtcatgtcaaaatttaagcagcatagaaggctataaaatgaaaagtgattccttcttcctctgtatgtttctatatgtataaaatttctgaaagaacacacaagaaactgttagaagagaggttctctctggagagtgatctgttgacttttattaataaaatctgctgtgttctcaaggtggggaaaccgaattctggacctgtgagcaagcagcttttttttgtgtaggcctctgtgagaagaaacttttaaaagtggtttatggtttagaacttggtagggggcatgatagacctcattgggacaggctgtggcctcttgtttttgctcctgaccctgagaagtaacttatctcttaagactaagtttcttcagtttacacaatcagatgagaaaacccacccttgcctttctctagagctgtagtaaaaatgaatgtttctttaaagagtccttgacaatagatatgtagctaagtattacatatggatggaaataccatatacatgcatgtatagagatggtgtatggggaagctttgtcatgttctctctaaccattccatctctgtgataaagtatggagagctttacccagttgcttaactgtgattcagaatgaaatcacattttcaaaactttgcttaatttattaaaattgatcagtgttttggatcaacatttgggaggtatggaaagaagaggcaggagacatacataagaagcttcttggacatatgttgaatatatgtgagcaatattcagattttgcagggaggaaagtgagtggtaccaagatagtgtcctgtacagggagtcaaaattgtcttcttctgtagccgacccacgatgctttgggtgcttctgtggccttccctttacatggatctcagctcaccgcatagctttatacaccacatagctcccatacagtgtgactcaggcacttccttgtcatttaatttgttatgaccagcatgttttgagtttgtaattcaaatgtgtaaaattttagttgaaaatactccttttaggtggttgcaagtgagattccctaaaagaaggtaagaaaaatgactgatgttaagctgagagaaatcggaatacggtggtttccaaaatgggcttttctttcctttcttcctgcctttctttcttcttaaaatcatgtctgcatccagaagcataaggatgagagacttctaacctttccctgatttcaacctaatttcaaggagaaataagggtcacacaaggacaatgtatttatcaatgaccaatatcaactaagatacatgcattattcatgtgttttgaaattgatttattggctaatgtaggcgcaaccatgtttagcaacatccagaatttaccactgaactttctttttaaaaactttcacttttaagggattgggaacaagatctaattgatagaaatggaatttgcatggaacttttcaggaattcagctttgtacaaagggccttgtgcaaaggattaatccaagaacacaggcttttttagtgcctttacgatggtctcctttctttgtggcttatttttgtgctttaagtgtctttggaaatgggatgagaggaaatcagagaactcttatgaacaagatatgaaaacactgatcatttactgccactatttaaagcacacacagctctctgagcagtgaaagatgtcagcggcacttttgaannnnnnnnnnnnnnnnnnnnnnnnnnnnnnnnnnnnnnnnnnnnnnnnnnnnnnnnnnnnnnnnnnnnnnnnnnnnnnnnnnnnnnnnnnnnnnntatggaactctacacagttcaaggcctttgagggaggaatttaatttggcttcataacaaagaaatttaagacattgagtagagtagtttaattatattccatctttacatactcagtaccttctgttttgctttgaaaactgtcatggctagagaatgaagttaaaaatagtcactgctgtttaaagcgtattttacacatgtagctgtgtacattctcttgctttgtgacctgcatatagggatccttctggcagtcagacacgaagagtcagtgaccccctttcctctccaccccaaagcagtaccatgcagaacccagattttttttttttttttttttttttttttgagacagagtctctctctgttgcccaggctggagggcaatggtgcagtctcggcccactgcaatctccgcctcctgggttcaagcaattctcctgcctcagcctcccgagtagctgggattacaggagccgctaccacgcccagctaatttttgtatttttagtagagactgggtttttccatgttggtcaggctggtcttgaactcctgaccacaggtgatctacccgccttggcctcccaaagtgctgggattacaggcgtgagccactgcaccgggccttggatttttggcattctggaattttggcatggtgggggttctggctggaggtggaagcatccgtcttggccccactggccttggggccagagccctggtccatccccaggccaagtcctaccagatcagctgctaagcctgaacagcacttgagggcagggttggtcttcatacctgataatgagaaagtggaaatggcaatataattcccagtctgtgcataacggtagttttagaattggatgatttaaaacaacaacaataaaacaaaagctgagctttggtttcagtaaggttttaaagtgaggtttctgaagggattgtattatttgcttgcaagcctgagattcactattctgaactatgggtaataaagggtgattcaggtatattgcttccaacatacagaaaagggccagaaattacccatggagaaagatttctttccatctcatcttctattttacatttagaagggtttgcgtttgatgttagaccaatgtggggtcaaattctggctcagccaccgaccctgagtgaccttttaagttacttaacttttcccacgtttccttttcctcatctgtaaaatacttcccttaacaattttgtaaagatcaaaagagagaatgcacagtataatccctcctacactatatgtggtaagacagttataattcctctatgttgtatgtgttaaaaagtagctgctgatgttactatttttatgagaaagcccatggactttaagatcagagagctttggtcttgaatttcagctccttagataaagtggcccatcctctgagatcttcagtttctgcttctataaaacaggaatgttgtgagaattaaaggaggcggaaaaagtctggtaccttagaccctttgtgagaatttgcccatgttgttttctcagcaagctgcaaagcgtaaattgctttgatcatggttctgaaaggaagagttgtctccatcacatttacgaaaaggcagaattagaagtgaccaaaattcagttgttacaggtttgtcctttagggatggaaattcagcctcaatgattagttctggagaaaagatcagtgcctaatttaaggaaatggtttttaaagcttcccctgctttgctaaagaagcagtgacgtcaggcagaaaaagggtggttaaaatgcaaagtaagagactgcagcagtggtcgcctctaaagagctgtgatttcccctacgtagtagtggagtctctttctaatgctttttaaatgaagaggtgactatgggcaatctcataaaacagcccaataccaggatatggagaaaacgtgaacattaagtaatcgtgccccagcattctcatagactataacaatattggctctgagcaaagtaaaacaccattccccctctggttgttggtgatcccgggattgaggggttaatagcaggatcggtgtggatatttttggcaatagacgtgagaaagctgtggcaagcttccctgtcagggtttagacctgatcccaggtaaaggagggaatctctctgccttctggaggcttgcttctcggcagtcctgggtttcgccttctccttctacctggcagcagagccacctgaatgtctctttgttgggtctgggtggagcaggagtgctcgagggagcactctccagccctaccctggccacctatcctcactggctgtcggtttcctggtactgaaagcatcactgaccaacacagtgaaatgccccagtgatgaaaagctgtccccaccaacactccagctttggatccttccttgcccatcagcactcaggaagcccttgaaagaaggtgaacggagaaaatattgccagggtttccctgcagattgcccgcccccaacccagccctctgattacacacactaagtgccgctctctgtgtaaataaccttttcttccctgcctcccttcagcctccctgctccccctcccatgctcttaggctctctcgcgtgataaatagccaggctactgctcagcatgcactaacacctgggaataatcatgcaaaaataacagtgagagactgccgcgcgtctgttcttgacattaactttcctcggtttgacaggctgccaccaccagctgttagacttatgggtcttttttttccagtggagatggctgctttcctgctttcctctttttttgggttctaataggttacatcagtgtcctatcaagatgacagaaaagagctttgacaaagaaaccattgctaaaacaggccagttctctattctgatattttattccagttgttagtattattagactaataatcccccactgatttttaaatgaggaatatctgattagaactatattagtgtttctcccctcagaaagggatttgttgttgcctcttgtgaattgcctttgaatgtagcaaatactagcatttggtcccatagggccaaaccacctatcgatttcaggtctcagatatatttgtaataatgatactaatattgacaatagcaatagcccctgtttattgagtgctaccttctaccaggccctgagctaaagttatttgtatgatcttctgtagtagtcacatgagccagatgttatttccgttttacagatgaaggcactgattccccagagcgatcaaactacttgcttaaggttttgtagctaacagtagagctggattccaacccccagtgaagacagatccctgccccaccctgtcttccattaacacgctactttttgctctcaggccaccatgaaagttcctttggttgtagttctacaattatccttgtaattttgctatatttgtatgattatctgaccagtgtcacagtcttgcccactacacagtcagtccagaagggcagggacctggtctgtttgggccactcttgttctagcaggttgcacggtgcctggcaaatggcaggtgtgtagtaattattgggtggatgtgtgataagagttgaggtgagctgactgttagggcagcagtgcatgagaaaaagctgcaactagagattaggaggaggagattctgtagtagtacgggactcatcagggccttcatggtgatcccatcattgccataaaattgtaaaatggaggtgggttaagccagttgactgctgccagatgtcagtgtatgaaagaagcagtatttccccaggctgagcttctcaaggttaagccccctttcttgtatttttaacatactttaattgcacttaaccatgcatttggaggggattatagatttatgttaaatatagtaggatataaaaaggagctttggaaggttgggtgcagggttagggaactataatatcagaccagggacttttaagccagtgtttactgacctaagcactatgctgagcattcactttgcacggattatctcactgagtcttcactgcaacgcttgtgggggtaattgttattattactcccatttcttagaactagacactgagtcttagagaagagaagcgcggtaacttgctcagggttccacacagcaagtactgacagggtcagcatttgaacccaattctgtctgctaacagaaccagaggttcaagtcctggtatgctgcctcctcactggagggagtccttgtggaaactgttgccaccctctgccttaatgaccttcattggctgaagaaattatggttcagtgtatggatcactgacctgagaaaccagggtgcagtggagttgatcttttgtataaggcaaaaataactactgaaaatgctttaaaatcctgctttacatatgatacatgtgacttcacgtttgacactgagatacacaagagaactgaaaccttttggggggaaattcttacctagcagaaagaattggccacactctttgaattacttcccttccacccttcttctgtttcccagtgtatgttgaactcctgtcaattttctgcttgtgggatgccatcgttttatgtgtacctaggctgccactagagacagcttattacacttgtacaaatatgggccacagttttctctcgactgagtaggttgggctaggcgacattctgtgattgtttcaggcagagggtggaagcacaaactccagcattctctggttgggcaagtcacgtggcaaggctgcagtgaagctcagttctgtcagttgatgccatgaggaatgtgggcccaggagagcacataatccaataattattttacgaaataggagaaatttaaattctttcctaatttattaaagtgttgctaaaaaaaactggaatgttttaaaaagtaacatacctgccaaataaaaacacctctgggagtggctgtaatccccacctgcaaatcctgttcttgctggcgacctctaaggaagaggggcctatggtagaccacacggggagactttgtgctccacctcctccccaatcccgacatctcacagtgaatggggagaaactgcgattctcctctcatttggttctcctctcactggtagtgctggtctggtacctatgggagtggcagttctgagccaccatgagaagccgatactacagtgaagaaacgaagaaattcacttgtgcaagtcaaagatgtgaacctcaaaacaatagtaactgtcaggtttaagccttaaaagccttaaatagtctaaagactattatcacatcggagtgctatttatgattaagtgtatatttatagtcaaactctctgaaccttagctttctcattttaaaacatgttgaactggactcaaaagttcttgctataaatatcagttcaactttcatgttacatttgaattgtgttaatggtaacaaacacaattaacttacaagtaggcccagagtactctggcttctcccctcaaggcatccagattccatagtaaatttgaacttggaaattacataaatatgagagagagagagaggggtgtgtgtgtgtttctgcatgcaaatatatctatagatggagttatgttgaaataaggatttagtctagaagctgttgtgataggatatgtcatcaatattaggcggctgaaaagtgcatttgttgttgctgttgttgttgtttttaagggacaggggcttgctttgttgcccaggctgtagcgccatggcatgatcatagctcactgctgccttgaattcttgggctcagttgttcctcccacctcagcctctcgagtatctgggactactcgcatgccaccatgcctggctaatttttaaatacttttttatagggatgggggtcttgctgtgttgctcaggctggtctccaactcccagcctgaagtgatactccttcttggagctcccacaatgttgggattacaagtgtgagccactacacctggccaggaatgtgttttctagttgaggaaaatgggcctcagagaggttgaatgactctccagggtcataagctagttaatatcagagttggcgccaatcctagtgttagtatgtcttgccaccataactgtcattgccccattgtgttctcacctccaaatcagagaactgatacgctataagactcatctctaattttatttcattttcctatgcatcctattcaagctacgtttgttctcttggtattaatgtaggctgttgatcaggtgatgtgaagaatattttcagaataatgttctattttttcttttcaatttatacatgtgacatcgaattgcagtcagtttacaactaactatacaaattaagaagctggaaagcatgcaaaaaaaaaaccactggtttataattttctttggtctttacttttaattctggaaagtgattctaatctcagacagtcttttagttgtaataaagactactaggtagcattgttttttttccccccttaaatttcctctctcagaacccctttgttcatttgtcagctcagttttaaaataagaactatcagtgtgaactttgatccacattaagctacatttacacaaaagcataaatcacagtatctggggtttggggctgttaaatgcttttctttcctgggctctgtgatcaagaatgcagaacaataaaaagcgtggagcaaaagaagttttatggcagctttgagagcaggaaattaagtttttttaacatgcagatgggtgaaaggctgttctgttgcatcttggatcactcaggcaagtgaacgtcagtttatcattttagtgaaatgcaaactgtagaaatagttcctacagtcatatgaacaaggagcccacacagatgactgcttcagctgtttaactaggagcacacttcctcatatgactcttgaaatacactctttttgttttgtttcttttcaaaaaaaaaaaaccaaaacccaacaaagactatatactattacgcctgcagccaagtggctacaaaagataacttacagtggataactgggaatctatgaacagcagaataagataatattttaccagaatgatcttcgatgcgccctttttacatataggatttgttagcccaactgataatacatgcaaggtgtcatcccttaaatgtaggccgtttctatgtgcaacacaaagacataggtaatctggagtcttggtacaaatgggctttgtgtgtggcattttcacaaccaataatcagggtcaaagctatctgtagcagtcctagcagttgttacaatgggccaaatgaatgtactgtttagtacatggcatagcctttggtttcattatggccagacttttaaactttttgtgatgaagaactcttttgctgctctcctggggatagcggtgcaaaggggatgccattgcaccacaagatcttgtagttggctgcgatttacatttcctgtatttagagaggtggtgactgagccttaatcaaactcattagggatctttaccagtttaaccacggaagaatttgtgcattggaaaaactcaagttatgttgatgttgggcacatgcatttatctccccccttatatgaattctgctaaactttgcaatagaatgcttaattaggagttgatgcttaatacatgctaacaatatccagtttttgtgtttcggtgtagattgtaaagtttatgtatttatatattcagcaaagctaatatattttagtagtgatttaattcattatggtttataaagttctttgaaaacaattttatttcatctcttatacttaaatttttagtgtttactggagtttctcctttagaaactgttataatttttaaagtgagatttcattacatgtgagaagtagccttaattttgcaaaacatgtttcattcacgtctgctgaggctaacggttgtccaatgatgaatttagaaggagaaggacactgaaaacctgcttatgattcagggagctagcgctctcatgtttagcttatttggcatgaaaaaacaaaatgctcatttctattctcctttatattttggcaccattaaaacactcaaagcatattataattgcaaatggaatttggaatggtgatatattctagaagtgatataagcaaattgcattaaaaggaattcacggaatgcagcactactgcagtaagcctgtctgtctttcaggttgaccccctgtttacagtgccagcgccaccaccgccgatttccagcagtctcacgcctcagattctaccctcctacttttccccatcttcatccaatattgcagcaccggttgaacagcttttggttcggactcgttctgtgggtgtcaatacatgtgaagttggagtagtgacagagccagagtgtcttgggccctgtgaacctgggaccagtgtgaatttggaagggatcgtgtggcatgaaacagaagaaggtaaatacaatttatttttatatatttcccgatgccctcttccccatgatgtatttatgtccacctgtgaggagaatttgttttgcggtattcagagaggaatggaaagtgttttttatttccgctctctggatttgtgttggaagtaagaaccgtgtttgtcttcttgtgcatggctgcttttaaattgcagatgagttgggtgtttctaaaagtgattctcctctttaagtgctaacatggaaggactgtgagaagcaggtgagggtttactcttcccctaaaaggtattgtggaaattaggaagggagatagatctcaagtttatttaattcttagggtgccaaccaatgtgtctgtcttgacatggttgtttttgtgttgtagaggcttatatttactttctgaattgagccaaggttcttgcacatagtgaggatcattgtcatgatgtggctgtggccagctggtgctcagaagtaatgaggccagggccaaagacttaagccctagtaagccggtcacttctcttctatggccagagacgtaaaaccttttctgttccttaactcggcaagccatttggcaaatgcaatccattagccacaagagaaacaaggttcaaaggaaatggatcaggattaatctatcattgctattggaatataaatcagagcatatgccatgctgatagtggatccaaatcatggttgaccatgtctcatagcacatgaccaccaggtatgaagtgtttcatatggccagtgtcactaacaagccaaccaataattgaaaactaactaccaagaagatctgtagtgctccattggggagtgagtagagtagaagagataaggaagaagcatgctccagggtgcttcagagtggaccagagaacaaagaaaaatgaaggggtgggggaacttttttttctctgtaagttagatcggtcaaagataagggagatgacagttgttgatatcatggtcatttgccagaggagtaagggcaggatgagggtaacaaaagggtctgagactcacaattattcatcagattcctctgaatcaagggagaaaaactgagggccgaaactcaaagggagaaggtgaaatgtattcaaaagtggctgagtggatggggaatattgagggtaattgctgggcaagaagtagttgagaaaaaatagttaaggatagtgacaaactgggaaatgaaagaagaagataaaaataaatgaaaatcagatgacaagtgttgagcataattcttaaaagatagaaaacagctcaagctgtttcaaggtagaaaacaaaggttgttagagaactctgaattctacatattacattaaatatactcttgtgcgatatgtttcgtagttaaataaaaatatttgtagatagcactggtaagtataaataaagacaatacacaagaaagaatcagagaaaaggactgaaagtagctatggtcagcttttgtttgctcagagggaagtgattaaaatttacttttttggctttagaaatttttgagttttgggtctcttctttcattttgtacttttaatttgggtttttcagatattctgggaagccatttgaaactatactgtggaaccacattgggaggaactgatgtaggaggagccagaatttgtctcatcttgcttgtctgttcagccaccctccagtacaaggggtcccatgtggggagcaagcttctatcatgttattctcttgggttgtgcagtttgccttcccttagattttctctaagggaaatggtggataaggcgttcagactgacactcagtgtgaaaagtataaaaaagtattgaagatcttaataaggtcacagtgaatttgtttaggtgcacattttcaggaacagaaaaatatttggaaagtgtaagggtaatttccctaaacttgaacatcagatttttttgtacttggataatttactcattagcgtgaaatgctgtcttcccatttcttagctatgacttagcactcccatcagtttattgcttgtcatgattttatttattcaagtgtggagtaggactaagtccctgcagtgtgacctcactgggtggtagatgttataaaattagccacaaactttctggaacagctgtaaagcttgggttatttttcactttgcttagaagtctgcttagttttgacttttaaccttagcctcttctcaaagataagattatttaggaaaaaaatctgggtttaaaaactatagcagtacataagttggtgtggaattctgggcatatgcttaaagagctgtaaggtattattactgttgttattatttgatagtgatatacataaagcctcaccagttccactctgtcctctgaaaaactggtctcctgagtccaactgcctttatacgtgctctgttccatccatttctgtggatatctttgtacattcgtacagcggactgatagctttagaaggttttcaggctgttggcagccccagccttctctttactgcctcacattttccaggatttggaatgtgtggatgtttactgtggtgacaagaaggagctggagctgttaatagagttattcttgctgaataaactaaacttctgacctccaaagaatttaagaactcatcttagtaaaggcctgggtcataagatgtatgtttaatgtgcaaccatttgcaagagcgttccatttgcatttttctcactatagtgtgtttaaagctcttgtaccaatttaaaaattaaacccacttgaccattaattttttccttttgggagaaacaaagagagacacagaacaaacacattgggagccagttatttggcagagctgaaagagagggattccaggagaaggggaggggagagtaagctacaatagttttgtagtgtgaggtttcactaacaaagagcttcaagttgagcatttataaaactgtcaggtgcctttgactaatgtcctgtagatggagttgaataaaaccccgtccctggtattttcacttggagagagagtattgtgtaactggtagtgttttccacaaacctaatttgttacgtgcgttcatatgtctgtgaaggtcatatatgtgtgtgtgttttaagatcctagaattttaagagttcatgcctgcactctttggggggaatattgaatattactgtgatttatttggatggttgggaatcgcaagactggactaggaggatccccattcaatacttaattgtttcttgtgtttggagtttctcattagaggaggattcttttagtcagtctttcccctagtgttactgccagtacatgaagtactggttgtctaagaaccaagttgtgctcaggaataaagtgttactagtgaagttccctctggaaaaaattagtgggtttcagatcatgcctaataggagagaaaaactattactgcatttggatgtttggtaattctactctgatcttttttctttaaggtaaatgcataggaccaatgatgtatggtacaaaattactcacagatgttggaaagaatttccttagcatttattcctgccatttgggacacatatgcctctgtatagtcatttgtttgaaaatttgctctttaaaaaaaaaataacaaaacaaaccagaaaaaacatggtgtatatagcaatatgtgtaaatacatatgtgctgaacttggctttttagcctttatgaatgtgtttccttttgatttttattgaatcatgtttcttattggctttttttttttttttggccttacctgagaacatacttggtttagctgcatctgtcgccgttattccgaccgttatttactactgctctgccactctatcattcacgacgcttttactttcttactggttaagtaaagccatgaagaaaagaaagtgagagaaagaaaagtggtacttgccaaagagggttctcggtgctgtgcctttgaatcaccttgggagcttttaaaacccactaatgcccaggcaccaccccaggcatttgtttagtctgggttggcattttggtctggtttggtattggtgttttgtcaaagctccctaggtgattctaatgtgcaaacaaggttgagaaccactgtctcatggcaaagagttgatgtcttagccctttgcaagttccttgactttttctctgtaaggaagacacatgtattattgcttcactttcccaggtataaaatggacatagggacacccgtcctacttacctcacagagcagatagtgtctatcaagatgctatggcaggtgagcagggttgtttaatcactgtgctgatgaggaagagggtctggctttgctcctcaacatgaactccacagaggatttaagaggcttaacaaacaactggtagtaccactcttcctaatttattgatatgggaagagtggaccctactgttgatttctcaagtgagtccaatgcaatacttctatttctgtgtggcctctgctgaattattttttagatgactcagaaccccatagtattaaggaaagttgttaatgtagcaaatatagaatgtgctgagagaatcagagtttttggcgggcaatgaaaatacaaagggcaacttatgatagtgactaccattttaatgagaagactcagcacctggtgtgagaggatgaatgcttgtttgtatgaggaccttcttcacctgatgcatttttcaaggaaggaaactgattttgggaatccgtgttttcagggtagttaattggagaaagaaatgattctctctctctctttttttccttttttttttttcttgagacggagtttcactcttgttgcccaggctggagtgcagtggcatgatctttgcccactgcaacctccacctcccgggttcaagcaattctcctgcctcagcctcctgagtagctgggattacaggcatgcgccaccacacctcgataatttttgtatttttagtagagacggggtttctccatgttggtcaggctggtctcgaactcctgacctcaggtgatccacccgccttggcctaccaaagtgctgggattacaggcgtgagccaccccgcccggccgaaatgattctcttttaaatcaccagagatgttctaaaattcttctgcttctcctatatctccaaagtcataaagatgatagtatttaaatgtgcaatgtaggaggaggttcaagctaattctttttttttttgagacagggtctcagttcatcgctcaggctggagtgcagttgttgtgatcatggctcactatagccttgatctcctgggctcaggtggtcctcccacctcagcctcccaaatagctgggaccacaggtgcataccaccacaccagctcattttttttgtattttttgtagacacgaggttttgccatgttgcccatgctagtctcgaacccctgggctcaagcaatccacctgccttggcctcccaaagtgctgggattatagtgaggtatctcactcagcctcaagctaattatttaaaaggcaaatgatcctatgtaatggaaaatgaatctgtggtattgttattctcattctgcagtattacttgccaatcttactactgaaaatagaacttttcttttgaaattctgattaatttgaggtgagattaaacattaatccaggcttgctttgtattttcagtaacagcatggagttggtacagtactttacagagtgaaatattatttattgaggtatatcatagtgactttatcaattcaactttgactctcaagaggaataagatgtctgtatttcgttacccctatccaagtcagtggcgattataacagtgcagtaatggggaacttgagatgtctagtgggcatgcttcttatgactcctgcgctaaatggagataaatcagcccccaatgtgtgagttgggcaggtgagcatggttgtttaattaccatgctaatgagaaaaagggtcaagtggtgagcctcaacatgaactctacagaagttctgaggggctggaagaactactagttagtgccactctgtattggctgtgaactttcccctcggcttcctgggccatcttgccatggaagttgtcagtgaaagtgtggatggttcccgtcattctgagcaaactgtcgcaaggacagaaaaccaaacaccgcatgttctcactcataggtgggaattgaacaatgaggacacttggacacaggatggggaacatcacacacccaggcctgtcatggnnnnnnnnnnnnnnnnnnnnnnnnnnnnnnnnnnnnnnnnnnnnnnnnnnnnnnnnnnnnnnnnnnnnnnnnnnnnnnnnnnnnnnnnnnnnnnnnnnnnnnnnnnnnnnnnnnnnnnnnnnnnnnnnnnnnnnnnnnnnnnnnnnnnnnnnnnnnnnnnnnnnnnnnnnnnnnnnnnnnnnnnnnnnnnnnnnnnnnnnnnnnnnnnnnnnnnnnnnnnnnnnnnnnnnnnnnnnnnnnnnnnnnnnnnnnnnnnnnnnnnnnnnnnnnnnnnnnnnnnnnnnnnnnnnnnnnnnnnnnnnnnnnnnnnnnnnnnnnnnnnnnnnnnnnnnnnnnnnnnnnnnnnnnnnnnnnnnnnnnnnnnnnnnnnnnnnnnnnnnnnnnnnnnnnnnnnnnnnnnnnnnnnnnnnnnnnnnnnnnnnnnnnnnnnnnnnnnnnnnnnnnnnnnnnnnnnnnnnnnnnnnnnnnnnnnnnnnnnnnnnnnnnnnnnnnnnnnnnnnnnnnnnnnnnnnnnnnnnnnnnnnnnnnnnnnnnnnnnnnnnnnnnnnnnnnnnnnnnnnnnnnnnnnnnnnnnnnnnnnnnnnnnnnnnnnnnnnnnnnnnnnnnnnnnnnnnnnnnnnnnnnnnnnnnnnnnnnnnnnnnnnnnnnnnnnnnnnnnnnnnnnnnnnnnnnnnnnnnnnnnnnnnnnnnnnnnnnnnnnnnnnnnnnnnnnnnnnnnnnnnnnnnnnnnnnnnnnnnnnnnnnnnnnnnnnnnnnnnnnnnnnnnnnnnnnnnnnnnnnnnnnnnnnnnnnnnnnnnnnnnnnnnnnnnnnnnnnnnnnnnnnnnnnnnnnnnnnnnnnnnnnnnnnnnnnnnnnnnnnnnnnnnnnnnnnnnnnnnnnnnnnnnnnnnnnnnnnnnnnnnnnnnnnnnnnnnnnnnnnnnnnnnnnnnnnnnnnnnnnnnnnnnnnnnnnnnnnnnnnnnnnnnnnnnnnnnnnnnnnnnnnnnnnnnnnnnnnnnnnnnnnnnnnnnnnnnnnnnnnnnnnnnnnnnnnnnnnnnnnnnnnnnnnnnnnnnnnnnnnnnnnnnnnnnnnnnnnnnnnnnnnnnnnnnnnnnnnnnnnnnnnnnnnnnnnnnnnnnnnnnnnnnnnnnnnnnnnnnnnnnnnnnnnnnnnnnnnnnnnnnnnnnnnnnnnnnnnnnnnnnnnnnnnnnnnnnnnnnnnnnnnnnnnnnnnnnnnnnnnnnnnnnnnnnnnnnnnnnnnnnnnnnnnnnnnnnnnnnnnnnnnnnnnnnnnnnnnnnnnnnnnnnnnnnnncgctatcttgtaatatttgtgtgtatatgtggtattgttctgctttttaatcttcttcctgtaaagaaggaattagtaagaaaatcttgagtgtcttaatattatagtgactgagctgaagatgtattttctaattacaaaatggagatggtctcattggctgcaaagaatagcttgtaatcataggtaggcatttgattaaagtattccactgacatttaaaaaataagttctcacagcagctttattgagatataattcacataacttaaaatctacgcacttaaggtgtataattcagtgtttttttctgtgtgtattcagaggtgtaccaccatcaccgcaattcatttcagaacattttttatcaccctagaggaaaccctgtaaccctcaacagtcattaccacttactccaatccccccattttgttgacttttacatcattgtccttgattctttgttgtttttatgtgtaaacatgtatgttttgtagacaatagaagggactagcttgttgagtacttactttgtgccaggcattgtgctaggcatgcttgtcaggtcatgatttcctttaatcctcagaaaaaaagccaaaataagcccactgtcattatctatattttaataaaggagacttagaaagggattcatctgtgccaggcagcacacctggcaagtgggggagagtctgaatttgaacacactgtggttggactttcagagcccttgctcttcatacaattcctgggtgttctggatttctgtctaccccttcacaaaagttcctgtctattttacaaagtgctctttggaaagggagtcaaatgtgatgtaataactggagtttatttttaaacatggaatgataggaatttctttataattctagcatctgattttggcagtagtatttgaatcagcttcagctgggttgatgtatacaaaccatcattttcagccccactatgctgtgagcttcttaagtgcacaaattccatctgttttgttcactgttggatccccagcgcctggcacagagtcagtgcgccatacatatttgttgaatgttgaataaattcgtggaacaaagtgatatggtcttgatacctgtttgagtagtgtagctttctagtcaggaatatgctacttttaaattaagtttggtctagacaattgaaaatagagaaatctactttgtcactgatttttaaaaatccattataaaatctcattacattttattatatttcagcttccaaccttgttattgtaagattaatctgcacaaggaaggaggaacaaaatatttgacatactttttccctcaaatcattcatatcctcaatacggtttttatttttcaattataaaaggaatacatgccattttaggagatttgggaagaaaagtaaaaatgtagatgggaaaaaactctataatctcacaatttaggtgaccacttcatatgttagttcattttcttgatttttttttttattcttaaccataggtaccgtgttgtactgcagatctctagaacttagttatcttgaacaactaaaactttatacctattgagcagcaatttcccctttttcccaccgacagttgctggtaaccaccattccactctgcttctgccttggccaactactttagatacatcatatatgtgtaataattatgtgactggctcatttcacttgatgtaatatccttaaggctcatgcatggtgtcacatatgataggatgtccttttgacatgctgaataatattccagtgtgtgtatattccgcattttctttattcacccattgatggacacttaggttgctttcatatgttggctattgtgaataatgctgtgatgaacatgggaatacagacatctcttcaagatcctgatttcagtttggataaataactcagaagtggaattgttatcttttgattttttaaataatgactatcctaacaggtatgagatggtgtctcatggttttgattgcatttcctttgtggatagtgatgctgagcactgagcatcttcacacatacttgttggccatttgtgtatctcctctggagaaaagtctattcaagggttcccccagccctcaccttttttttttgttttgtttttgttttttaaataaaagagacagggtcttgctatgtcacccagcctggagtgcagcctcaaactcctgggctcaagtgatccttctgcctcagtctcccaagtagctgggatgggcctacagatgtgtgccaccatacctggctgagacgggggtctcactatgttgtgcgggttggtgttgaactcctggcctcgagtgatcctaccatcttggcctcttgagttcctgggattatagcaaataacaaataacccaatgaaaaattgtgtaaaaaaagttgtgtaaaaaattttgcacactttttcattatttgtgtgtgtgtgtgtgtgtgtgtgtgtgtgtgtgtgtttttctgttgctttgaaggagtccctgttttggatattaaccttttgtcagaaacagagtttataaatattttttcattctttttccttttactctgttcattgtttcctttactctgtggaatctttttagttacatgttacttgttagttacttggcgatttttgcttttgttgcctttgtcttagtgtctttagttcagatcattcagtggataaggtttttttttttgtgtttttgtagagatggggtctcaccatgttgcccaggctggtcttcaactcctgggttcaagcgatcttcctgccttggcctcccaaagtgctgcaattacaggcatgaaccactgtgtccgacctggatacacttttttaaaaggctgttttgtaagagcagttttaggttcacagaaaaatcgagaagaaggtacaaaaatttcccatatatcccttgcccctacacatgcatagcctctccattatcaacattccccaccagagtggtacatgtgttacaattggtgaatctaattgacacaccatcacccaaagctcctagtttatattagggtttgcccatggtgtgatacaatcagtgagtttagataaatgtataataagctgtattcactatgtagtttcatacagagtatttgcactgccctaaaaatcttctgtgctccacttactcatctctccttcccccatccctagcaactactgatctttttattgtctccattgttttgctctttctaaagatgacatattgttggaatcatactgtctgtagcctttttcagattggcttcttttacttagcaatatgcatttaagtttcttccatgtcttcttgtggctcaataactcaatgcttgggagtactgaatattatttcattgagtctggatgtatcatggtttatttgtccattcactcctgaaagacatcttggtaacttccaaggttggcaattattaataaagctgctataaacatccatttgtaggtttttgtgtggacataaagtttttaactgctttgggtaaataccagggagtgcaattgcaggatcatctggtaagagtatgtttagttttgtaagaacctgccagactgttttttggaaaagtggcaatactgtttggcattcccaccagaaatgaacgagagttcatttggtgttgtcagtgttgtggattttgaccattctaataggtgtgtagtggtatctcattgttttaatgtgaactttcttgacaatttatgatgtggagcctctttgctggtacttaccagccatctgtatatcttttttgatgagctgactgttaaggtttttggcccatttttcttacagagttgttttcttattattgaatttgaaaaggtctttgaatattttggaaactagttcttcagttctttctctctctctctctcttttttttttttttgagggacagggtcttactctggtcttaaactctgtcacctatgctggattgcagtggtgtgatcatagcacattgcaggtttgaactttttgactgaagctatactcccttctcagcctcctgagtagctgggactacaggtggtgtgtaccaccacacctggctaattaaaaaaaatttattttagagacagggtcttgctcagttgcccaaactggagtgcagtagtacaatcatatcaagcacatcacaagcgtatcactgtaaccttgaactcttgggctcaagtgatcctcccatcttggcctctcaaagcactggattttgggcatgacccagtatgcctggtctttagcttttctcatatacatcttatacgtatttcttttacatttatactacctaagtatttcacctttttcattgctaatgtaaatattattgtgtttttaatttcaaattctacttattattggtgtataggaaattgattgactttttgtatattaaccttatatcctgcatccttgctataatttcttagtagttctaggtagatacacttttaaatattgccttcttttaatcttaacattaaaacacaagcatttctgatgttatgaaaacactttctaggaagcattttttaaaatatcaaatattccatggaatggacacaccaaagattaatttaatttaaattccattaacaatggatatttacattgctttcaacttcttagataaatataaataggattacatagtatatctttgtgtatgaagtttttttgttttgttttatgaatttggaatttgtatgctgggatcaattttcaggaaactgaattgctgagttgaagtatacaaacatttctaatgtagtagaaacacatattgcctaactgcttcccctaagagttgtaccagtttatatttcctggatgagagtgcccatctcagttattctttccaactttggacttgctgacattttgatgacaaagggatgaagttgtaagtcaaatgtatagctctcaatgttcatatccagggtcctaccctaggtagaaagggaacgagactttctccttatagtaaaaatcaaaattgttcagcaggaggaagcaagcgggcaagtgatgctcccaagagaccacacggctgggctctgcctcaatggagggctttgctctggatgacagaaaggttgggatttaacttctgcttgtgtctagaatgactcttacagctctttttctcccaagtgaaggaagttaaaagatacttttaaatatgaagaattcaaacactcaagggagaaaattagtctgtcaaacatccattctgaactggaaggaatctgatttacttttgttgctgtctctgcaaacatttttctttgggattctgctttttcagaataaagaaggatgaaggacaggattttctagaaagcattttgcgtctcatgatttgtttataatatataatgtgtcacttgatgcatgcagtgtgcagttttccctggcatgcccaagtgctgtcctgccccctgctacttttatttcctcttgtagtctcttttcccttgtcttcttctgtatataactacagcaggaggaagaaccatcaaggtagtttttaaaagtagtatctacgaaagcattcctatatgcccttctggggcctttctgatctcaaataagtttggctggtattttcctggcaaaagaaaaatgaactataatatgacagaagtcatatcatggattttcaaaagctgtcctcaacaaagaaagtaaggggaattcggctcgtgggcacaattgcagggtatctagcgaagtctgacataacccagtcaggagacctaagaaggttaaaaaagtgctgtgaggcaggcaaggtgcttactgctcatttgataatttcttggaattgaatagtaaattgagcatttattatatacatacacattatacccatagatattcattcatatttaagtcttcaatatatatatttgagactctttcacagtatttgagtccttgggtgtcagaaatgtggctgtttcctttatgtgacacaagacacatttggtgcatctgaacaattaaacacttttgcctggagaaccttctgttgctctgtcaacaccatctagttagcattttctcatttacggagatgagtcccataattaggcccattattcttatggaaaaactgagatacagaccatccaaagaaaatgactgtgggaagtatgttctttctggatttctagttttatctaatattattagtctttcctagttttaagtctgtttacgtgtgtatgaatataactagctatttaaaaaatatgctgtgagggaaataaatacacatttgcttgtccgtttgaggttttgactgaaatgtggaaacttaattcagcttattaagtgaaatgtttttaaaatttgatattcaccaaatatttttacaaaaacaccccaagtgtagtttccaactatatatttcataacaaggaaaaaaaattgcccaccacttcctgtgcctcagagagtcaatgccttgtattctcctggcccagtgggcagttttgatcctgccagctcttcgaggacttacttgtacctttgcacagtttgtatactgtcttgtggatgtcttcctcatatccatgttgacagacaacttttgaagtaactcaagttgacagagctgactgagaacatttaatgtgtcttatttcacttgagcagcagcagaggccaacttgtttaaagagaacctgcaaaagctgctttccactgttttcctcagcttcatgagaagacctagtcacttttcagaatacaaaaagccagccagttccagacagtgcacacagtgcacatataaaattatttattgtccagacaaacatgtgtggctgggtaccagaaacacagaagagccacaactgggactggggcattggcttggctccctcttgaagctggctgcagtaagcaagtgtgtgagagtcactttcagttcaaaaagtctgaatactcaagggcagacacattaggaggccatagaccaggaaccaggacaatcttcatggcaaagcagtagcaccatgttgaacttgtctcttcgtagactcctgcctgatagggtgaccgaagggcattatcccattcacagggacagagaatctaatgggattaaggaaatggagggtcagctttaaagaagcagaatagagtgagctacttaaaattatattggttgcacattaatcttccacgattcagaaggagagcattaccttaaatttcccagttactagagaatccctgaagtatacaccctctaggaaatctccctttatatnnnnnnnnnnnnnnnnnnnnnnnnnnnnnnnnnnnnnnnnnnnnnnnnnnnnnnnnnnnnnnnnnnnnnnnnnnnnnnnnnnnnnnnnnnnnnnnnnnnnnnnnnnnnnnnnnnnnnnnnnnnnnnnnnnnnnnnnnnnnnnnnnnnnnnnnnnnnnnnnnnnnnnnnnnnnnnnnnnnnnnnnnnnnnnnnnnnnnnnnnnnnnnnnnnnnnnnnnnnnnnnnnnnnnnnnnnnnnnnnnnnnnnnnnnnnnnnnnnnnnnnnnnnnnnnnnnnnnnnnnnnnnnnnnnnnnnnnnnnnnnnnnnnnnnnnnnnnnnnnnnnnnnnnnnnnnnnnnnnnnnnnnnnnnnnnnnnnnnnnnnnnnnnnnnnnnnnnnnnnnnnnnnnnnnnnnnnnnnnnnnnnnnnnnnnnnnnnnnnnnnnnnnnnnnnnnnnnnnnnnnnnnnnnnnnnnnnnnnnnnnnnnnnnnnnnnnnnnnnnnnnnnnnnnnnnnnnnnnnnnnnnnnnnnnnnnnnnnnnnnnnnnnnnnnnnnnnnnnnnnnnnnnnnnnnnnnnnnnnnnnnnnnnnnnnnnnnnnnnnnnnnnnnnnnnnnnnnnnnnnnnnnnnnnnnnnnnnnnnnnnnnnnnnnnnnnnnnnnnnnnnnnnnnnnnnnnnnnnnnnnnnnnnnnnnnnnnnnnnnnnnnnnnnnnnnnnnnnnnnnnnnnnnnnnnnnnnnnnnnnnnnnnnnnnnnnnnnnnnnnnnnnnnnnnnnnnnnnnnnnnnnnnnnnnnnnnnnnnnnnnnnnnnnnnnnnnnnnnnnnnnnnnnnnnnnnnnnnnnnnnnnnnnnnnnnnnnnnnnnnnnnnnnnnnnnnnnnnnnnnnnnnnnnnnnnnnnnnnnnnnnnnnnnnnnnnnnnnnnnnnnnnnnnnnnnnnnnnnnnnnnnnnnnnnnnnnnnnnnnnnnnnnnnnnnnnnnnnnnnnnnnnnnnnnnnnnnnnnnnnnnnnnnnnnnnnnnnnnnnnnnnnnnnnnnnnnnnnnnnnnnnnnnnnnnnnnnnnnnnnnnnnnnnnnnnnnnnnnnnnnnnnnnnnnnnnnnnnnnnnnnnnnnnnnnnnnnnnnnnnnnnnnnnnnnnnnnnnnnnnnnnnnnnnnnnnnnnnnnnnnnnnnnnnnnnnnnnnnnnnnnnnnnnnnnnnnnnnnnnnnnnnnnnnnnnnnnnnnnnnnnnnnnnnnnnnnnnnnnnnnnnnnnnnnnnnnnnnnnnnnnnnnnnnnnnnnnnnnnnnnnnnnnnnnnnnnnnnnnnnnnnnnnnnnnnnnnnnnnnnnnnnnnnnnnnnnnnnnnnnnnnnnnnnnnnnnnnnnnnnnnnnnnnnnnnnnnnnnnnnnnnnnnnnnnnnnnnnnnnnnnnnnnnnnnnnnnnnnnnnnnnnnnnnnnnnnnnnnnnnnnnnnnnnnnnnnnnnnnnnnnnnnnnnnnnnnnnnnnnnnnnnnnnnnnnnnnnnnnnnnnnnnnnnnnnnnnnnnnnnnnnnnnnnnnnnnnnnnnnnnnnnnnnnnnnnnnnnnnnnnnnnnnnnnnnnnnnnnnnnnnnnnnnnnnnnnnnnnnnnnnnnnnnnnnnnnnnnnnnnnnnnnnnnnnnnnnnnnnnnnnnnnnnnnnnnnnnnnnnnnnnnnnnnnnnnnnnnnnnnnnnnnnnnnnnnnnnnnnnnnnnnnnnnnnnnnnnnnnnnnnnnnnnnnnnnnnnnnnnnnnnnnnnnnnnnnnnnnnnnnnnnnnnnnnnnnnnnnnnnnnnnnnnnnnnnnnnnnnnnnnnnnnnnnnnnnnnnnnnnnnnnnnnnnnnnnnnnnnnnnnnnnnnnnnnnnnnnnnnnnnnnnnnnnnnnnnnnnnnnnnnnnnnnnnnnnnnnnnnnnnnnnnnnnnnnnnnnnnnnnnnnnnnnnnnnnnnnnnnnnnnnnnnnnnnnnnnnnnnnnnnnnnnnnnnnnnnnnnnnnnnnnnnnnnnnnnnnnnnnnnnnnnnnnnnnnnnnnnnnnnnnnnnnnnnnnnnnnnnnnnnnnnnnnnnnnnnnnnnnnnnnnnnnnnnnnnnnnnnnnnnnnnnnnnnnnnnnnnnnnnnnnnnnnnnnnnnnnnnnnnnnnnnnnnnnnnnnnnnnnnnnnnnnnnnnnnnnnnnnnnnnnnnnnnnnnnnnnnnnnnnnnnnnnnnnnnnnnnnnnnnnnnnnnnnnnnnnnnnnnnnnnnnnnnnnnnnnnnnnnnnnnnnnnnnnnnnnnnnnnnnnnnnnnnnnnnnnnnnnnnnnnnnnnnnnnnnnnnnnnnnnnnnnnnnnnnnnnnnnnnnnnnnnnnnnnnnnnnnnnnnnnnnnnnnnnnnnnnnnnnnnnnnnnnnnnnnnnnnnnnnnnnnnnnnnnnnnnnnnnnnnnnnnnnnnnnnnnnnnnnnnnnnnnnnnnnnnnnnnnnnnnnnnnnnnnnnnnnnnnnnnnnnnnnnnnnnnnnnnnnnnnnnnnnnnnnnnnnnnnnnnnnnnnnnnnnnnnnnnnnnnnnnnnnnnnnnnnnnnnnnnnnnnnnnnnnnnnnnnnnnnnnnnnnnnnnnnnnnnnnnnnnnnnnnnnnnnnnnnnnnnnnnnnnnnnnnnnnnnnnnnnnnnnnnnnnnnnnnnnnttccaatataattatgagttatgagctcttcattgctatgtagcacattattctagatgatagtaccttaaaaacaacaatcatatcccacagtttccatgggtcaggaatctgggagcaacttagctggtgcctctggctcaggttgtctcagaaggtttcaatcaggctgtaggcaggtgctactgtcagctgaagaccccatccagtggagatgaaggagccacttctaagcttccttacatggtttttggcaggctttaattcctcacggggcaatttgacttgctatgccatgtgggcctctccataggaccgctcacaacatggcagcttgcttcccagcaagatcagagagagagggggagagagagagagagagagagacagagcacccaaaatggaattcatagtcttggaataacttaatgttagaaatgatagctcattacttctgttcgttataagtaagttcagcccacactcaggggagggcatcacacaagagtgtgaatgccaagaggcagtggtcattaggggccatcacaagtaattatgaggctgcccaccacaagtaattatggttaggccaatattcagtttttacattatgactacagcacagtcatgttctatgattaccttttctaatccaactcttttccacaagttaataacttatttttttgtttgcttagtgttctgtgcatccacactgattcaccatcaactgtcatgccagaattataaattgcttctgggtgtattgaaatacaccaagtataagttctatatgttttatcttttgggatagtttctcccagagttttctgaccttctccaatctggactgattgcttaggcattattcatagctataaaaatctgaaatatctcttgtataccattctgaagatgccattgcctcttatgttggatacactatttcctgactcatttctcttggtccatcccttcattttcgtggtgcacattttccaatagcttcctaaaaaaggattcatggtaggccggacacagtggctcacgcctgtaatcccagcactttgggaggccaaggcggaaggatcacctgaggtcaggagtttgagaccaggctggccaacatggcgaaaccctgtctctactaaaagtagaaaaattagccaggcatggtagcaggcgcttgtaagcccagctactggggaggctgcggtaggagaatcgcttgaacctgggaggcggaggttgcagtgagaggagattgcaccattgcactctagcctgggaaacaagagcgaaactccatctcaaaaaagaaaagaaaagaaaagcattcatgggaagtcaacattttgaaagctcagatgcttaaaaaatgtaacgcgtaaaaatgtcttctgtctaccctcatgcttgattgataatggggtcacatgaagacttggttgaaaatcatttttcttcagacttctggagattatgctcctttgctttgagctccccagtgttgtctccgaggagtccaatgtccttcctgatttcagatcttgtatttgatacctattgctccaccccagaaactttcatcttttctttgtttccagtattctgacatatgtcaatgccatcctttagcatgagtccttttttagagtcagggacttgttccttcacctaggctagagtgagtagcatggtcctagtacactacagccacaaattcccaggctcaagggatcgtcctgcctcaggctttcaaataggtgggacttaacagtcatgtgccaacatgctaggccaattttttttctttctattttttgtagagatgggatcttcctaggagtttaaaggtagtcttgaactcctggcctcaagtgatgctcccagctcagcctccggagttgctaggattctttttttcttttcttttctattttttgagatggagtctcgctctgtcacccaggctggagtgcagtggcacaatctcagctcactgaaaccttcgcctccttagttcaagtgattctcctgcctcagcctcttgagtagctgggattacaggctcccaccatcacgcccagctaacttttttttgtatttttattagagacggggtttcaccatgttgaccaggctggtctcaaactcctgacctcaagtgatgtgcccgccttggcctcccaaagtgttgggattacaggcgtgagccaccgcacctggcctgggattctttttttaatctgttgttctgagcttggtcctcttgttgaaaactcaagtcctgcagttttggaaattttatagatgtatttctttagaaaggattaatttccatttccatgctctctctttctggaactcattttatgtagaagttgaacctcctctaccaatcttcttttctgatctttctccttctttttcaaaactctggtttatatgcgttttgtattttctgcctggagagtttttcaaatttatctttgctttttcatttccctcatgtagtttttaatttctaagcgctttttattttctattttggttattggcattgctctcttaaaaagccttctattctagtttcatgaatgaagcatctcctcatttctctgaagatatttaattagcttttctaatttcttctttttattgtcagcattgcttttaattcgtctaagtttcttttttgtttatgtgtgtgatttgtcatgtgtattttttgttggagactttcctcaaatgcctatgactgttggctgtctgcttctatgagtggtgcgctgagaagctagtttgaaattctacatgcttcagtagaactggttgatggtataggcagacctggatcaattatttctgtagagttgcaattcccatattccttttctcttgcttttatcagttttccccgaaaaggcttcactgatcagctggcagccaactttcttggtgccaattttggaaaaaaagagagtgaaggattcactcttcattatataaactttataaactatgacttaaatcttcctttttttttttagtggccataatatccccattttacaaataagaaaatttttagagctttacatttctttgttgtaatttcttcatagctgttatttattccatgacctgaaatagagataatttcagtcaatatggaatgtgccatcataattatccttctacggagatctagtcatttaatttatcattattgtggtttgcttggcctatttttttttcaaatgtggcttcagcgatgcttggttttcagaagactataagcttgggacttaaaacagcagcatatgaatggccagagtccccctaacccagccctacctccctcccttataggtccttgccagatcattatgttgggcttgagctctgtttttatctttacttatcaacatgagctgttcgccaagctggtttttcacaaattctttcaatgttgaccagccctttaatatctgcacttctaagaatcaaagtcctaggaaaagacagatctcataagcactttccttctacaagggacagatgcatggaagacacctccttaaaaccaaggtacactgctatgttctgtggtaacaccaagccacggggcagggtgtattccccagagctccaaagcactctgctatcttaaccaaagcacattcagtcacctgtattttcaagtttttcttctcagcctagaaaggtgctttttcctttagtctacctacttcagaataataacaggtacttgcttgccttccttgagtggagactgtaaaaggtgattttaaatatcacattgatatcttactctgaggcagggatttttctctctcttgtccatgtatgtagccccggtgcccagcacattggctgttaccaataaatatgtgttgtctgaaggaaggaaggacagaaggaaggaaggaaggaaggaaggagggagggagggaggaaaagaaggaaggaagaaaggaaagaaggaaggagggagggaaggaaggaaggaagggaagggaaggaaggagaagtcaagtgaactcatgacttgacttcaacctgactgaaaacaatcttcccacttctgtccccgctccctcccatgttgctcaagtcctacacaggcacccagagggagcttgttgcatggagtccgtgctgttctgccagttgagtaaataggtgacaggcagtaaactgaaggaaacgtttttatatccttaaaagtgttatcttcgaggagcacagtttgtaatgctggagtgaaaagaagcctcctttcagatggccagcttgatgcaggcaaagctgctaatttgttttcaacttcaaggagatttagagccttggcttccctggcagtagctcacagtggaattgttttcttgctccttcatgtaagtctgctgcacggcaataagaaaggccggggtgtttactgaactggcaggaccaaattcttctttttgcagacagacctggagatttgttgcccaggacttttctgacttaatggtgtactcttgggaaaatacaccaatcttttttcatatctgagggcaaccacagaacagcccacaggaaggagcactagagtccagtcacttacctgttgggaaaggaagaatcagagggaaagcttttggctcatgggccctgggcagagctgtcatcagccctggcagaagtagacagcatacaaaggaaacacacatcaactaacacgcaccctcagaaaatgctagccagactcaaacctttggcaagtgacacccctggctttgcctgccagtctagatgtgagcatgggaacggaatggcagcccattgtggtgggaatggcagttccaagttgtccttttctggcctccggttaagtcccccgtctgtttagactacatttacaggaacctatcagtggcacttagaaggggaatgtagaaaaagaaactctgccaggtggttctatttgtgcattcttggtcagccatttcattattatgtggatttccatagttaattagattaattttagtctattacaatttgatgggatttttgtcccaaagtggaggcctttgggtactgagagttgaagttttaagatttcttggtaatgcctggatcaacattctaggaattgcttcattgccagctttccttttttggtggtggaaaaggcatgaataatgccttctttgaagctttaaggcacacaataagctaagaactctctaattgaactttacaagctgaaggggctgacttacgggcagcatttgaacaaacttctagtcaccataatttagtaagggttggctgccaaaagccatgtaaggctttatttgatccatttatgaattaagagcctgcagtaaattaattaccatatattggggctaataaaatctagcaggatgagaacgcctttgggttcatctgcagagaggaataaggactgagagctgcttcctggtgtctgagtgtttctggctcggggccttctgcagtgctgggcaagggtggtgttcgtgctctgtgtccaccaaagaggcatttgagctagcttttggctttgcaactgctggaaggctttgctctattgatcataataagctgttctgtcttattaaagttgcatcatggagtctggtttttaggagccctattgagaattagttgcagaagaagcgatttgcttgtattttccgacagttaacaggccaagcagatgggagagcagacctgaaatagttgggttggctgcctgccactgttctatgaattttgatttgcacggatatgtaatagttgtatttttcccttttttggaagtacttgcctgtgagccttgggaaaattaatccttggtttcctgtaaagtatacccttgtacgcgaatgttgctgcagtgttccttacagaccctgtgctgtgtcctatgtcaaacagatcaggacaccatagactgtgtgttcagttgaagaggagaagaggagagttctcgctccagtttcccatggctcctcagggaaaaactgttttcattcacaatttactttgtgttttaagatgttttccctttcaaagggggggattatttttcttttccttcaggctgtgttcaccaaaatattgaataaatgcaagaaaggatgttaaatttaagcttaagaaaaggaatttatagacaaatgtgaaacaaggatgaatgtatctgggtgaagatctgagttcttcctaaatcagttaaaatcttgtcttattaaacattaaatatatatgcaaaataatattttaaaacatatgcataagatataagaaacaacatgaaagcaaacgtatatttcctatcactagattaagtaatagaaaatttcactttcaggacttttttaacccctcagtgatccttccttaaccctattgtggttgttgccctccctacatagccgctatcctgaattttgtggtttttattcccatgttttatcatatacctctaaattcctaaataatgcattgcttagttttgcatggctttgcactttgcataaatggaatcacatatggtatatttttccaacttgcttttttcactcaacatgaagcatgagttcactgttaatgctgcatcatgttgtttgaatataccattattatttatccattcttgtgcccatggacttttgggttgtggccagttctttactatttcacacactttctcctggtatctaagccagttgttaaacaaaccaatctactttaaatagtgtgcggctatttttttttaaagatttgttttgctaacacggtacgtcacaaaatattttaggtattatagattataaaatgactttgttacacacttcaaagaaagttccatatttacacaatagtgtaaaggaacaggagctttgtttgtctgctcttaatagcggtctagataagtcattgcttctgcaaaatgcatttcattaatatttgttaaaactacagcttgaagagtcaaatggaattttaagatcagaaagataaacagaaggaaaagaaaacctccaagaagtgcctaccatttccatatgctgcattcacctctccttcttgggttcacagagcgtttattgtttgcactcgcccctcagatggctctaggcttctctggttacttctctccagtagcattcaccaaaggcctttgatgacatctctttgacttcatttaatgttgagaacacactaagttctcaataaatatgtaccatttttcaagtatgacttctgagacaggctttgttgaacaagtagaatgctacatctctacttctgcagcccatctccttgctgccagcaggcctttgtgtggccagctgtctcatgtcttttagctcttggcagagatactacctcccagaaaggcatttcttgactcccttttccaaaatagtctctctcctattacttcctaaacctttgccttattttcatcaagaatttagtacttaaaattatagctgcttgcttggttattatctctcttgccccatgtgggcatggagtctgtcttgtccgctactgtattccaagcacctagaagtgcctaacgccgtgagggggcagagcataaaaatggatggagaaagtgaatttcccttaaataacagatagattaagggtatttctaaaaaaatgatggccgtagtctcatggaatgaatcctgacagggacaagagtcatttaaacaagtcattaaactctttaggccttatttttctgtctataaaatgggattaaggatttagtaaacataaaatattaacggatacaatattgctataaaaaatggaaacattattatgagaatgtgttacagatacctaaactgccactggccatactagcctaaatgtttgtgaagggaatgtggattgaaagtgttttttgtaaattttcctgcaggaagaaagcagtcttcaaatagaaaaggatcagttaggttggaaggctccagaagactttatatttcaaatccatgatctccaagtcagcttgagtaatttttgtcaagaatttgcacacgtttgaatgatttgtcacttagctaacatgtactggaaacttactaataacatttttagttttcttcttagcacttaggtgttcagccttctgtaaatttcacccttgctgatactctttaatatcctcttgttttttcatcagggtgtatttttatctgactagctgagttgcagtctccttcaaaggagagactgttttgtttttaatttatttgtttttaattagttgttgtatttggcaaacatagtcatgtgctttgcagagaaagcgtgtttggataaaagcttattaagttgtttaaatacttttgattaaccttagaatcgattaggcccattcttctcaatctagactgcatattaaagtcattttagggctgggtgtggcggctcacccctgtaatcctagcatttggggaggtgaggcagaagatcacttaagtccaggagttcaagaccaaccttgtcaacaaagtaatatcctatctctacaataatagaataaaaaaattagccaggtgtggtggtgcatatatgtagtccaagctactcaggaggctgaggtaggaggattgcttgagcctaggagtttgaggctgccgtgagctatgattataccattgcactccacactgggtgatagagggagactctgtctcaaagcaaaacaaacacacaaaatcattttaggaacttagaaaaaaaatgcattggctcagtcctaatggtcaaatattctgaattaattgatttaatatgcagtctatgcatttttttaatgagttagtttgtaacttcctacaagttattctgatgagcagtgagaactgagaaccactaaactaggctggaacattagttcaccaatgtggctgcccactggaatcacctaggcaagttaaaacctactgatatttgggccccatttccacagaatttgatttaaatgggtatgagcatcaaagcttaaaagaccacccagttgattccaatgtgcagcggtttttgaaccactgcactcaattatgggctctttgaacatagtaccagacacagataggttagcccttgtctgactttacctgatgattcaatttacctataatgtgtagtgcttgctaaaatgcagattcctggataccacaccagaatctacaggagaatgtttagaggaatgccaagctccacgatgatttttatgataatgcaagtttggggaacatggcccagtaaatattccacttctagaattattatctttatgagtgaattttctcataatttacctggtttgcctctgagcagagaaacttgctttgcaagtacatactatcttttgaataattaaaaaaaaatttcatatttagtgaaaacgtatataagcagcaaaaggcatcaaattatgccatgtgaggaaacaattataattgctttctttctgtagttaaatgatcataaactacatgctgtatatatccttgaaataaacagccgatttagagataagcatttgataataggaatatgcatcaaaactgatgagaagtcttattatacctgaggtttcctctcccctactccattttctatttaggcttttttgaattttgagctgttgtctggtttgtgtttaactctattttgttttcatgatttttgttttaaggacatactcagatatagtattatattaaaaaagagaaatgaacaacaaaaaaaaagatgaaaagctgagctcattcaatagaatctatcgaattctattatgtgcctagcattgtgtaagaatgtttatacattttttttactaggaaataaattaaaagtttaagaccatctcttgtggttggaggataaatataaatgttttacagtgtccaaaaaatgtacaaactgcttaatccaccaactagttaaccaattgcataataattaagagtgggagagatatctacgtatctgtatttctatctataaccatcatattgtctggtgtttctaatcatttgtaagagatttccaatctcttgtaggagaaagttctcctggtgtgagttaagtacactgagtttaataataacaagcatttgcagctttgtgctgaatccatttgaaaggatgcacaaactatgctcatactgatggtggggatgcggggtgggtattgggacctgatagttaagttaggccccctcattggctattggaggctccagaaatgtattaattgcatgtacccagtctttcgggttatgttttttctgcagtttgagaatagccagtccactgcagttacccttttttcctgtttctttgagagtcaccttaacttagtaggaacttactgttgtcacctcatactcactacaagcctatgataaatgacttgggctcatacttttttccgatgaaataatttttaggagacatatttgttttctctggacttcctctgaacaaggttaagatctgagagttttgccttttagcatttgagaaggtaacatcaaaaggctgttccttcaaagaatgtcatgttgctatttaattggtaatcacttttcccctggtttagctctgggcttggtaaatttaataggctcagtatttttattttattggtactatgagatgagtgtctgaatcaaaacactaaattctgattaggaagacagttgaacaactatactgaagatctgttccagtgttacttgagaaacatcttaaactatgttacagtgaaaataagtgaaggtccttttgctttttgtaattattcattttgcatgcatttttcatttagtatcaggagacagttttcctgtttcccagtcaacttagccttactgaggtaattgagggcatagttagattagtttattagttctttagagattcattatttccatggaggaagagcataggccagtggttttcaactctggttaaacataagaattccttttttttaataagtggcctttgggatccagatcaaccaaatcacaatatttaggagtcagccatgctgtggttatttaaaaacaaaatgaaacaaaacctcccttataattaatgagcactaggatcggaaatcactgacacagacaaaccagttctgtattatatttggctgagagagagttaaatcaagtttatttaactaggtgcctattaatattttatgttgtattactcggtagaattcttagggaaagaatgactttttaaaaatgtttttcctggatactttcttaattcattatttgattctttttttctctgtagaattgggcttctctgaggcctgttaccttttctgtgtacttgatgataaagaagcccaagggggctggacacaatggctcatgcctgtaatcccagcagtttgggaagctgacgcaggtggatcacatgagcccaggagttcgataccagcctgggcaacatagggagacccccatctctacaaaaaatttaaaaaattagccaggtgtggtggctcatgcctgtagtcccaggtactcgggaggctgagctagaaggatggcttgagcccaggaggttgaggctgcagtgagttgtgatgtcatcctgccactgcactctggggtgagaccctgtctcaaaaaaaaaaaaaaaaaagagaagccccaggacagtatgatgtgcctgtttcttagccccaaagatgagcctagtttctttctccatataaaatatttttgtttaagggaaaagagacaaatttgactcttgaggtattgtgtgggtagacacatttagaagagaaggttgagaaattaaatctggtgttctcaccatgtgctgtagtagttattagaaacttaatgtggaatgggatttgtttttgtggtttcaaatgacctttcggatatggtgagttatttaaaaccccaggtggcaaggtgagtcttggcacattactgatctaggaattgggcaggagatacacaggcagaaaaagacctttctgggcttctctttatattgtgtgtctctatttctgactatttagttagagcttcctttgaatattttattatctacttggtttataatcaggaccacccacctgattttagcctgctgactcttttctgcctttttattccctcaagcccacagtgcatgtgtattcatgtttttgctttccattcacggagatctccagctgggaaaatatagtgtgtacaatactctctgccttcagctgacattgctcataaattgcaacagaaacactgctatcagcagcttaatagcaggtagaatacagctctacatatcaagtctcagcaggatacagaaactatggttaccaaatttccaaaggagaaggggagggggtagaaagttttctatctaagaataactgaaacaacattgaaaattgattcactgaaagcagctttttgaaaacgacttataagggctgacccagtggttgctctgctgtcactttttgctgaattgttatttctgaagacctcacaagaagggttttgtgtgatggaacggtatagaaaaggcaagcttgtttgcttctcttccttcctttctctgtctctgtctcttatagttttaaaagaaaagaaagggcctttgataaacttaatgaaaagtgtactggttaactgattctaaagtagggtgattaggtggagttaggagttaccctcaggcacactcaccgtcatacataggcatccctggcagaggatccacgcctatgacaaggaagaagcgagccttgctattagttttttctcttagctacaatttattttatcttgcgtggtgactcgtccagttatttgacttctggtaaaatagcacacatttacatagcatatcaagacgttcatattttaggctatgatgtgaaaatgggcagtcttatagagcctttccattaaaaaaaaaaaaaaagaaagaaaaaggatagctgcacttgtgaaaatttccagtgctttatttagcacatcattttatcttaataagtgagattatattaatattttgaaaagtcccaaattcccctctatctctgtgaagaaaggattgctgggctccgtcatcttttgtgagtagccacagcagaattctgcctcttgccagaagagattagtgtgggtggtaaaataattctttctttaaaccaagtaaagctgttgtattaatactcctgtcataggactcaggcagataaaaagctctcagccttgttccaggctccttagtgacttctaaaggaatagtcaaatatatcctattcccacctgcaacccagtccccaaaatactggaaagtaattaatcaaaattatcattccccatttctttcctggggaaaactcaacacagtttatgtatatcttagtttgtataatgtacatttttctttaaagtctgttagcctagtggctctgataagaatcaccttggatccttaggggagagctagggattagtatctgtaataaggactcaggtgtatttttatcatctggcgagttttgggaaaacacaggagtctgataagcctaggtatgaaacccatctataccatcctccaggagtgtgtgtgtgtgtgtgtgtgtgtgtgtttgtgtgtgtttgggagaagggattcatggattttttgaaccagggacccaggttctgaaacctacgctatagttcctccaaaaatggaagctgattcttaacatttggaataagctagtgccttgcagcctatagcgttcacttggcagggacagcccatttgttttgagtattgtattgtatgctgtccactgttcccgtcaggtccctgggtgctgaaccatctccatgagagcaggccgtgtggtggctgatgccatgctgagaacacctcttcttccattgtggaaagcacagacagtgtgcatccgaggatgcagccccccacctttcagccagagtggctatgtaagccttgtgataaaatgaagcaagtagagcaagaggcttgcaatgcaagtttagataaactctattttgtaatgtgatttcggtgggggatgctgagtcagtaggttcattcttgtctgccacgtgtccctgtcttatgaaggtgctatcccaggaagtctatggtcatatttaccagaggcagtaaagtcactactgctccatccgattttttttttcttctcagtgcactaaatatggtgctaaatgggttatattttagcagtatgccctttgcaataggtagtcttctggttccttctcttcaattactttatgtgccacaaatctgagacatttgggtttggctgtcttgctaatgaggaagtttaggattaaatgaattggttgaatgattgattaaatgaattgcttcctgtgtcaccaactgaaggactttggttattgcctagtgtattggccccttctttacccagacctcaaggaagtcttgtcttaaaccccctattctccaaagcaatttctaatcacttagctttgtgttagtcttactggggcaaaattcccgaaaggctcctgggcgtgggtcaggccttccagctgtgtgatgggcgttaaaggaacattatgctcactggagaagtgctgagagccaggcaactggtgtcctgatggccacctaccccagaggctgctgtgtgggggcaaaggatcactggaagagaagaaagttagagatccaagtgtggtttgggctctgtttttggctctgttccaattagttttagggcccaggactagccatttaacctctctgggccctagtttccttcttgataaggaggacaaatatggaataagtgatctccaagattcttttgtgcttgaaaattacgtgatttttttttttctgtgtggtgttttgttttgttttgagacagggtctcattatcatacctcactgcaacctcagtcacctcaaggctcaaatgatcctctggtctcagccttgtaagtagctggaactataggtgcaagccactacatcctgcggtatatatagatatatataaaatatatatatatataatatatatatatatatatttttaagcatagagaaggtctccatatgttgctcaggctggtctcaaacccctgagctcaagtgaatcctcctgcctcggcctcccaaagttctggtattacaggcatgagccaccatgcctggcctttgttgcttgtttgttggtgtttattttatatgagttctagatgtgatatggtgaagcttattgtgtgattcacgtaccttgtcatgtatatttagcacgtgaccaactagagcaaggggcaaagcccttgagttgagggccaggagtcttctgttcactctctttgcaccggtgtcttctacatgggaatactgggtaattgtcacaaactgggttccatttcctagttccacagattactgcctatgtgatgttgggcagttacttattgccttccttgtacctcggttgtacgatagagataccataatatagtacctcttgtttgggtggttaggaggattaaaagagttaatatttggaagacattttgaatagtgcctaacatagtcagcatgatatgcacttgttaaattaaacaaacaaaagggcaattcccagtgttataatatttgttctaggcagagacaggggtgtctgtcattagcatgccagcatgctgtctataatttggaatttcaacatcgaagaccctgctacttgtagatcttcttacagttatcaacaatggtgttgatgttgccacttgttttcttccagccacggtgacggtgggggtgggaggaagctgtgttcaggggatgaatgcagtgcaggacttgcacagaatgaacactctgtccccaggagcccagtttcactgattatcagaagcagctttcctctggggtcaggtggaattaaactataggaacacatgtagttgggatcagtgctttatgtataaatgctttgtaaaagatatttcttgccccccaccattcctcctgccatcctaacttccaaacccataccaataactttatttctttaatgtaatgactggggttgtgaatacagtctaagtagatgttatcttgaagagttgatcttaaatacttcatgcactcagggatcaggcagttcatttttactttgaattgaattgctaatttatattaagtagattaaaatttatgtctctgtaatctgctgctccagaggataccttctgcatctgtactggccatatttactcatatattgattccacgcacctacattgttggttactgtgaccatgtgtttttggaatgacaatttttattaaattttttcattattttgtgttctattttatagaatatatgcttgcatactgggatttctacatatttgccaagtttctattttgaaatatgtctttacataaaattaggctaatttaattaactagggttaagcattaaaggccataaattgttaaacagatgaaacacacacacacacacacacacacacacacacacacacacagagcaaacccagtttgtattttgatatttgagttgtgataaaagtagtcacattgagttaataatcttccagggctgggggagcggaatgtgcctttgctatattatgaaggcaagaaaattgaagtttttttctttccatttctttcccttgtattaggagccaggtacatgattgctagtagcctaaagacctgacattttaaaagaaactactctatttgtattatttggagagcatgaggtacccaaaagcacactgggaaagaaaattatcttttagtatttcagctagtacaagggaagtgcctattagaagcaatgggccgcttgaggacatggattgcatccagtagtggcgcattcaccaaaaggcagatgaaaataatctgtaccaacaaggatcacaacaggaaacatcatctgaattttccactattgacaatcttgactatctagcctgggatttgcattgccaagcaacacgttaaataattttgtatctctttgaaatcaatttctggtgatcacacatgcagattgaaaactatggctttaagatttacgttcagtgaataaaatttacgttccctgaaaggcaaagaaggctgtcatttcatgcctcctaaccttcattgtttatttccctttggtacacacaagcaacctagtacgcacaaacgtacatgcccattatggagagatagctttctgctctgtcaactttgttttataaaagctctgttttctttattgcctttatctattacatctgtaaaatttattttaagcaatgacaaatccctctttggggcccagagtctgggagaataaccactggcaggctattgggaggagatttgttggatatgactgttcattaaactgcaaggagtagtgggagaggccaacagtctggatctgccatggctgggcatgttatgggctgtgtttagagcttctacatcaggtgagagacaaatgtacctcatcaattgcttttgtaatagtccaataaaactggatggctactgaaatctcaggaagattcctgatttctttgacttgtgagattacttattccacaaaagtttctaataaaaaaatagaaatacataaaaccaaattgtttacagctatatcgtcagattattttaaaaaaggaaagaaccaactgagacaggctccttcacttacgagatatcagaagcagctgatgaacaattttcacctttccagtttttacttttatatttgactggggaacataattataatgcaggagctcttttggctctgttgtactttattttaatatttcatgtgattgaagcatggcagttcagcaaattaaatttataaccattggtgtgccagtaagtatttaacaactggctcttgtggtgggagttgcagggagagagccctgatttgtaacatttgctgttttctttggtgattatatcaccaccgtggtcagtttcaagtttccagtgtgatgtcactgaacatggtatttttttttttttttggggggagatggagtctccctctgttgcccaggctggagtgcaatggcacaatctcatctcactgcaacctccgcctcccgggtttaagccattctccctacctcagcctcctgagtagctgggattacaggcacccaccaccaagcccagctaactttttgtatttttagtagagacggggtttcactatgttggccaggctggtctcaaactcctgagctcgtgatccatccacctcagcctcccaaagtgctgggattacaggtgtgagccactgcgcccagccttgaacatggtattgagaagagatgcttgccacctgcagcacatgcctccaacataccactatcatcatcaagatgaccttagccttgtgggtccccatccatacatgcaccattccttcatgacactgtgttatttataaataagtttatgtaaacttataaagtgcatttagaagtatggtatcagaagtcagactgcctgtgctccaaatctctgactttctgacctggggcaagtcagccagttaagctttccaagagttactttgctcatcagtaaaatagcaataataaaaggacctgacacacaggctctgaggaatgaatgagataagctgtataaaaacacttattcttgcgacctacacatagcatagcaaagcactcaatcaatgttcctaatatttattttctgtctttatcccctggggacaataacaaaaatgttaactgcctagtgtgtaaaataatgcttattttattagttttgaattgccttcttttaagcttcagaggaagccccaacttcaacttcaccaagattcagtgagcaaatcctgagttcagtttgtccataggcttacatttttagtgatttcaattttgacctcctgcagtttccatctttattaactcaagacttaaaatttgtagtgtgtcttttttcagcagctatttgtatattttgttttttttcctctgaattgtttcctaacttatttctaggctataagaaataggacgactcaagaaagttcattatataagaacaggctattattttgttttgaatgctttacaacatatgttttggtcctgttagcccatcgtagttatgagcttaatgtgctatgatgttgcattcttgtttgttaaaaattaaggatttgttaaaaatttaagctacagatacaggactacaatttaaagggaaaaggttaattgcaaattttaggtttcccttgatctaattctctctaatattaaaattaagtagaactgaaggcaccagaaaatgtaatnnnnnnnnnnnnnnnnnnnnnnnnnnnnnnnnnnnnnnnnnnnnnnnnnnnnnnnnnnnnnnnnnnnnnnnnnnnnnnnnnnnnnnnnnnnnnnnnnnnnnnnnnnnnnnnnnnnnnnnnnnnnnnnnnnnnnnnnnnnnnnnnnnnnnnnnnnnnnnnnnnnnnnnnnnnnnnnnnnnnnnnnnnnnnnnnnnnnnnnnnnnnnnnnnnnnnnnnnnnnnnnnnnnnnnnnnnnnnnnnnnnnnnnnnnnnnnnnnnnnnnnnnnnnnnnnnnnnnnnnnnnnnnnnnnnnnnnnnnnnnnnnnnnnnnnnnnnnnnnnnnnnnnnnnnnnnnnnnnnnnnnnnnnnnnnnnnnnnnnnnnnnnnnnnnnnnnnnnnnnnnnnnnnnnnnnnnnnnnnnnnnnnnnnnnnnnnnnnnnnnnnnnnnnnnnnnnnnnnnnnnnnnnnnnnnnnnnnnnnnnnnnnnnnnnnnnnnnnnnnnnnnnnnnnnnnnnnnnnnnnnnnnnnnnnnnnnnnnnnnnnnnnnnnnnnnnnnnnnnnnnnnnnnnnnnnnnnnnnnnnnnnnnnnnnnnnnnnnnnnnnnnnnnnnnnnnnnnnnnnnnnnnnnnnnnnnnnnnnnnnnnnnnnnnnnnnnnnnnnnnnnnnnnnnnnnnnnnnnnnnnnnnnnnnnnnnnnnnnnnnnnnnnnnnnnnnnnnnnnnnnnnnnnnnnnnnnnnnnnnnncctgaatggaatgctgtactcttcaccctgaggctatccagtctgttgctggctgctcacaaatagagctactagtttccactgaaaaagatctttagttattttaagcaaaggacatcagaaggaaataataggtttctacctcattcttccatcaggcattttcctgccctatatactaatccccacagatatctgccatgaaaaaatttatttattgttccaggtggcaacccccaagtgttagcattgtccagccaaacattctgtttgcattggtattagatttactggttcagggactgtggcgagtacaaatcagatttttgtccagaagtgtgtgtgtctgtgtgtgtgtgtgtgtgtctgtgtgtctgtaactcttgagagaattacaaggcaacctgggaggatgctgaaatatttggtcaggttttctttcagtgaagagaggtgtataaaacacacgctgatgatgagcagcaattaacagtgcattactttctggaaaaggcttgaagtcggctgccctgcaggtcagagtcaataaagactgagttactaacaatagcctttctcttgctaaagccttggacttaaccctaacttcatgagaccagagaataagagaataatgcgaacaataggagtcttggaggttgacttgggcctaatgcacagaggcagtaaaagctgtcagagagtgtgattgattggctcacacgccttagtccccagtgcgaagcactaatgttcctgcctcttctgagagggctgatgtgccacctggggtcagaacttatcagcctgtggggctaatgtttcagatgaggccaaagtgcagtcaataatttatacggaaatttgtgctcagattcgcaaggaaagcaggttttgacttgaattcctcagtcatccaagaaagaagtcagagccaacttcagatcttcctgctaacatcgctgctgtgtatattaatacttaagacaaacgtcaattgaagaagacaatttaagtcatcatgaagtatttatttagcagttaacatttggagccaaatttcaggagtttcagaattgatcagtgaaatggggaaaggaaacagcagcaattttgaattcatgaaaaaacaaaatcacctctagaatgtaataaccaggtcaggttaaatcagagtgacttcggaaactattaagtgtccatggggagggttggtttacaggccctgaaattgaggttcatgatactatgatactaacaacatggagagaaatgttaggtgatatcaaggactagaagagatacaaatatcggagaggaattagatttcagttagatgccttgaacacttcatcctgtttgcagagaacggttagctggctgtgtgtgactgtgtgtatacagacgatctcagtgtctgtgtaaacacacgtatttacacacagagtatatagaaatagacagtaaagcagtgacaccgagcaggctggtcaatcaataaccagctaagttttgttctgctccagcaaaatgacgactttgctccagtaagtgctaacaaaggcccttttaccttccctgtgctggaggagagcactattagtcacacttcattaggcttgtttacagaaaagagctggtctctaagcacgttattgaaatacttgtaactctgtggggcttttttttttttttcttccctgaaagataagaactttggaatgtggaatgggggagggtgggaaggcagcctctgagtgctgtcaagaaaactggtgggtccagatgggaattggaaagatgagttcatgtttaacctgctctgtccatctgcatccccagagccttgctgcagagtctcatttctgttgtcacggtactggggagctttaattttggcttttgtaatttagacaaatgtcaggcattcagttagctgttcctgaaaacatgaaatgaggttttcttaccctgaaatagtccagagatgaggcttcagtgatttagaactgcatttctcagttgcctttactattgagtagtcagaggaaatgtttgctttaaacaatggatgggttaggaaagataaattttatatcatttgaaattggtggtgggtatagaaataataaaagaagtccctcaggttggaatttgcagcccttaagattctaaaagaaagataggccacatttatagtaagcctggtcaccagcaatgtgggataattagtgtagatgcgcataactgagtttgcttcacctgggaggaatgcgggagggcttgctgccagctgcatttctgagtgtggaattcatagcattttggcatctccttccattcttcagcttatgacctgggtgagttacaggagagtttaaaagatgaggacgccgtagtacatatgctgagtggcttctttatgccagtgctcatgttaaatactttacataaatcacatcttatttaatatccatattactcccattttatagatgaggaaactgaggctcaggtaggtttaggttagctcaagatgaagcggctacaaagctggttgtgaacaggtgagtctgcctctgtctccagagacatgctttcaggtgcttagggtgctccatttgatggccactgtttattctttcttccttcctactcctcagaaatgactgcagagttcatcctttcagctttccctattgcattctgaacctgagccacatgctgtggcttctctaccagaatgtgggaactacttcccacactgcctgcagggcatggccacctccaggaagaacagggaggttcaccaacaacttaagcctcattcaccctgccgccaaaggtgaaactgagtctggtttctctgacattcatattccttgtttcctttctagatttgcaaagatggtggctttttggtgacacacaaaatgtacccctttgtgtgccatatacatgcagatctctcccattctctctctcacacacacacacacacacacagagttaagagaggcagttcttctgttttcggctgctgttgtaaattgctattttaaatttcagtgaatggaataatagcagagtgatcatttccagtaaatgttgttggcctttgtaaagaatagcttgttcagaggttttatgatttacagaggacacagctggtggccagcagagcggtaggaatgtatgctctcctgggcccggtatagctagagatgaaaagggcccagagctggcacaaaagcaaataagcgctctgactttaaataaagcatcataatttataggaagcctggctcttcaatcccagtgagacacatggatcagtagcagctttttgatgtggagcataattgtcaattggttcccactgtctccttacagctcaaggactggggatggtaagaaattactttaagatacagtcctataatctgtagttgtattacacatattttgacaagcaattcaatggcatttaaacctggaactctgctaatcacccatgacctactgatctacaagaggtggtgggtttgtgaggaaaactaggtgatgagaggagttaggaagacaatagctcctatttccttttccttgcctatccctccccacaaggcatgagatttttcattcttacattttatttcctttgcatctttcagtttcattcatcttggtaattactttgccttcctgcctgctcctccttcctttgctcctgccactggggaagaattgggcaagaaacagactatgctgccagatacagaaaatacggaagtggcagatagctgttaatgacttctcaaattcagagcattttacacccttctacgcccttttagtcctagagtactcgtcttttggtgagtggcatggagggggagtttttgcctgaaggatgatttatttttgtctggcttgctgttctctttacctgtttttttctagtcgaagtaatggcatcgtggagagcttgggtatctgagttgttaacttaaaaaaaaaaaaatcctgtaattaatattaagtgcaggaaaggactgggaccaatgatttgaatggctgcactctttcagttgcttatcttcagtgacctcctgagtctgacagtgggagtaagtgaaagctgtttccctctcattttgacagaccctggccctgtgctatgtgcccagggccacttgtaatagccgtcttctaaaataacactcttaggaaaggaatgaccattaggaggtaataccacaagatctgtgtcattattatggctcatagtaggcctagttcaataattacaaaatacctttcccaaactttttaacacttttatttaaaagaagaaaaatgtgtcctaacaagctaatgatacaagcttgtgagactggattggggaggggagtcaattctgttacagtggggcattgaacctttgtcttcccacaaagagagggaggaggaagagaaggagaaagcattctgctactctaatgaggaaatttggctttaaaaaaggagagggtttgagaaacctgccccacactagaaatcgtcatccaaactcatcagatttcagaccaaccagtggtgcctgacaaggagcaggagaaaaattaagtttcaaacttggcattagaaatcagagtgatgctgttgcttagtttggtggcactaagcctcaaaggaggcagctacttactaggaagtttaatcaaagacaagaaataaaaccccttggtacaaatgtatacagacacacactctatacatgtacatattcagtttatgcatttgaattgctccaaatgtctgtctcagaagactgtatttttttatttgattctatcttcctgtcctcctttgtcccttgcatcctgctgtgtgttgactgagcgctgagggaccacagcatgaaggccatcccttttggggtacagggggtggcttttgatgcatcccagttaaatgtctgacttgctgaccttgctgaagcaagctcaggggacttgtcttcttccctcctcccccaacactatcacctgaaacctgttctgcctgcctgtccccaaagtagggactccaggaaccttagcaggaactactagaggaacggtctacacaataaggggtacatattgtatatgaatggtgcagtacatatattttattttattttaaagctggcctcaagtcatcaagggcaatgttgctttaggatatgtatgtttgcctaacttaaaagcaaatatttttgttactgatcaaaattcctgattaaaaattactttctaaagatctccatgtgatttttttttatgatgctctttgttacttaaaatgtctaaattacacctatgacattttgtaactaggacacttgcttggtagaacatatgttttgattatttaaaagaagtaaagcatgtctttccacagtaaacattaattgatctctaatgatctgtttttgtttgtttgtttgtttgtttttttgagatggagtctcgctctgtcgcccaggctggagtgcagtggtgcgatctcaggtcactataagctctgcctcccgggttcacgccattcacctgcctccgcctcccgagtagctgggactacaggtgcccaccaccaggcccggctattttttatttttttatttttttattttttagtagagactgggtttcactgtgttgggcaggatggtctcgatctcctgacctcgtgagccacccgcctcggcctcccaaagtgcagggattaccaggcgtgagccactgcacctggtctctaatgatctgttttgatttagtatttcttttcatgttatatcttgggccctgtaagttttcactgatgcttaaacttggtcagtgaaaatatcgtcaccatctatatgtgcggtgcagcctcccacgtgaacatatgggacagcatcttagtgttaccggtggtgccttataaaagtcttatttctgctccctcttcttactcacaagactccttaacaggccattgtatcttctagaagtgggaaatgataatgttactagggaagcaagaaaaaagcagcttgggcttcttttagctgaccagtcagctggatattgaccacctgtcttcatgggaaagaaatagatggcagtgaataagcgagagtctagttttccaaagaagctcaatgattttcccaaatcaatacagctcatcaggcctcagaacaaaggctgcaggggaggtgacagtgatggaagtggctctgtgttcttttgtgtattaaaccataaggcccatggggaaacaaggtttctttagctgtgtgtgtgtgtgtgtgtgtgtgtgtgtgtgtgtgtgtgtgtgtgtgtttagggcttattctgtgtatttagggggaaaatcctttcagattttttttttaaaaaaggatttccatagattgtataccaatgaccaaatgtacttttgaaagagataagtacagtcaagtaagaaagattatcatgttttaaaatgcagagtagaacagcatttttccattgcttttgttattgcttaaggtttcattttttgttgtcgttgtatgtggattgggtttagatgaaccaaaaacaagtctgtgttcagattaacctctggcaaaccaagaatcgtaactaccctcccataaacaaaccctgttcctaatgccctgaaaataacaccaaaccctaataggaatgctcaactgtcatctgagaggttataattaacgcagatagagtgatgccaacatattccagccgctgacagagaagatctatccaaaccagcaatttttagcccttcagtcctttaatctttaagctcactgtgctttcataaagtagtacattaacaccagagcagtgtgtctctggggtttatgactggggtggcggcacactagggcataaagtgtttcattacacttccttttgttagtactgccctatctcccaagctccattgccatacactatttgttcagataaagccctatgttcagggtgactaatcgcagcactgtgttccagatggtttgattacaggatgtgtttaaagtgactcttcaaacattcagcccagcggtagggctctttaaaaaaaaaacatactgcattttatggtcatgtgacaacacttacttttcctgtcctagtgctctatatatacttggcacaggtaatgggaaagtccctctgatttttggctggcaggtattttatgagcaaccttagttgtacattttaaattttcccaaataattatatttgaagaaggatctgtctgaaggttataagctccgaggctggaacagcgaagcttgtgctatacaagattcagcctttacaaagtaccagtattgaataccacagagtgacgacaacataataatggggggagggagtcctgaacaaagaaatggtgataaatcataccttgcacaatagtcacgttgtgtaaaaatggagggtaatatgatatctgaaatatatgaattttatcctgtactcatgaaatcagcatattgtgacattttgtcaccaatgtttcactagaaaaaaatatataaaaggaaagaaatgtgtaaactttcttttttaaaggcatatggcatgaatgggttaccatttggtgttattcgaatgaggtttctgttttctgcctggatgcacatcaaatgcatccagatgtggtagtctgagagagttcaaaaaaacttctgtctgattccaaactcagcatttgcgatgcttggcaaagacttctgtcccggggatgaggcactttaaagactctgaagcagtctttaaactcaatacaaacagaattatgtcaatccactgggaaatcaggcatttgccccgttcttgaggaaacagcttcacaaataccagaaataataattcataaaccacatttataacatcttgggagcaaagcctctccacagagaatgtctatcatctataaaactagtgggagattatgcttattgaaaaagtatggtagtaataaaaggaagtcactgagtaggattcagtctagactctctctctcgtcagtcctcgtgtagttagttcctaggtgtttaatgaattctcactattaggtagccactgtgccgccaggggttgtgggtgcagacactgctcctattttcaaggagtgtcatctagttggaagagttaggcatactgtgtatacaagcagagtaaaatattatgggggccatgtattacggtaggacaaatagccttaagttcagacctgggaagttctccttgtcattcagggtcccagatgaaggagactctgccacctttatcctgaggacttcgagatcacaatagccatttccattgcagccagacagaaagggatgagaggttcttatgggccaggcctggaagtggcccacattcatcagttctctcacttgctttctgtaggactcagtcacatgtctgcatcggactgatagggaggctgagaaggagtctagttgtgagctcagaaaggggagggaaacatggctcgtacgtttccatcagggcaagaactgtgtatgcagtgctgtggggatccaggagagaatggctgtcttttggcagtgtgcctggtatgcgtgtgtctagggcaaggattcacagaagtgagaacctttgcatttgtctccatttgcttctaattcattaggaactttaactttccctagggatttggactaaggcatcttcaaggtttcttttaggggaattaaaaatgtgacatgaagaacggttgaagaaacttgtctaggctggagagtaaagaagacatagaggctgggtgtggtgggtcacactgtaatcccagcattttgggaggctgacgggggaggattgcttgaggccaggagttcaagaccaccctgggcaacatactgagagcccatctcattaaaaaaaaataggaaaaagacagtgagcaggaggtggggagaatgccaacatggtcattatccttgcctggatgaaaggctgttgagtggatgatgggtggactgcatctgcagggtatcaggaggctcagccaggaccaaggtattcaaagacaaatttagtttaacacaaggaacaactttttaacaagatggctggaaaataggcaatcctgggggagtgctggtgaaatcttctatcagtgatgaagctggagagaaaaaggacacacacacacgcacacaaagtcctgagggtgttgcaccaacagtgcagttggcttcctggtcttatagctattgcgcccttggaactttggcccatcatggttctttacgcctcttactatcttgcaagctttaggcttctactcctattgccagttctttggaacttccatatttctcattcagattcccaacataagtccctgttgggctggctgcctttgctccaggtgcccatcactggtccagtcagatgggggcagggttaggatcactggtctaggtgggggcaccatgaacatgaaatccagggtctagcctgacgtgatagcataaggggcctactgtaaaaatgcaggtaatagacaaaactatacttccacttgtgcatcacagtgtatgcctgtgtctcttctgttcttttcatgcacagactcttgaagtacagagtttggatggagctccaagtaaaacatggttgattccatagcactaaataggcacctaatgtgtaccctgtagacacacacaataagtgtttgttgggcttgacatcttcctggaaaccctttacaaaggacataacagaacactgactgaaatccttatgaggtctcaggcttttttggcttgaggaagtaacaggctcaggttatataataaagaccttgttcttattaaatgttctgtaggtaataggcctttgggggcagcatcttagacaaagtgttaacagtacaaagaagaaagctgtgtgtggtcagcacactctcaaaccatccattgtactcttcagctgtattcttactttattagtaataagcctcagatgaaatgttacagggcattagctctctgacaaaggccaggcccagtccatgggtggaaagggaagaataataaacctggtagaatacttgaatataaagatgaaaagtacctgtatagaacgtccccaacacctagctcactggctagatgtttgaataaatgtgcgtgaaaagaaactaatctttctggaataagtgtacacttatttccaattcacatgtgagaaatagaactttatgcccagatttataaaatacaaatttgcacttttaaagaactaattttcatcatgggcatttatgccttcagtaagtgtagtctgctttatgtgactgtgggttataaaatgttcaagattttgagatttcagcaaaatgataaatcatttacatgttttagaacctaaacaccgcctttatacttggcccttcacaatggggtgttgtctaaacatagaccttcttacaaagaaacagtacactgtgtagtttatatgagaaacattccttaagccttcattccaatatagagtggcagatttggctgtgtaaacatgtgcctgtatatattcggatgtgaattgtgggcagatttaaacactctgtggcattgtgaagcggctcgtacatataaagaaagatagacacaagcacacatatttaattagcactgcttgatggagactgttcaaaatctccttgggtgtaaagcatttgttttgagcattttaaatacggagtgcttctggaaaaataagggttacttatttaggccctttgaggttgaaaatggatttttctttccaggacttgattccttccgagtgcaaataacaacggcatcacttgtacttcgataagaggtctgcttgtgtggcttccagaaagagcagcaggagatgtgaataattttacagtgaggaagttgcaactgcagattagcctttgtgacagcttcaacctgtggccccagataaccagtgattaattgcctgccctgggtcccttccttttttcagactccaggtttcccttgagcctgtattgagacggtgaatttcgttctgagggttctgcgtgggccggcgtgttgtgtggagccgcgtggcgcggggagcgcagcacggtcacgcagaccgaagctttcactgcacggccggactcgttagtgcgaatgagcctgtgtcccgcgtgcaccgagggagccgagcagcgcaggcggccctctagccccgcacggccagcgcgccgtgggggatgcgtccctttgcctccgccacgctcacctctacccgaccgctgcctctgtgctccgggcggccgcctcggcccagccaatcagacgcgagtgctcgcagcgggcgccggccaatccgcggccagcgttctctggaaacgcgaaacccttaggggaaaagcaataacaaaagcctttcactgcagacaaatgttaagtgtctgtgcagacttttcctgtttttaattttattactgcaagaatggaaggtttgttgtttctttcatgtttcctttcaagcaattttaattatatatttgtgctacatcaggggactctggaacgcagtgattcagcctattggatctaaagctaaaatgcagtaaccttctggcagtacagatatattcctgcactgtaaatatagctgacatgctaaagaattttaagcagctgcaaaggtctttgacaccacacacagtgccccagagagaagatgatgagaaaaccagctcagtcttcccctttgcctcctctcccaccccctcccctttcctgaagggatgtgttcataaagaatcctttcctccaattgttctgtcttgtgcagattttgaccaaatgcctaattaccatggattctcatcgcaataggaaattttatacacaatggttttaaaaaaatttcctgagggaatttcattggaatcagctatgatttgaggaaatacttgctttgctccatcctagcctttcccctgctagcctattgctacagtacactgaattaacacagagtaaataattcagctgttgcctaagtaatagcaacatagaccatatgggaaacaattttaaaatctccttttgagactttggaaagaaatcgttctccattacttgagtcccaaccattgaaatattttacctgctgttaaaaggttcccaaggaaatgagtcttaccttgtcaggtttcccttactgtaaaggagcccactacaggttttctgtaaaattcacaatggcaatggtaatgcaagtgagcaaactagctagaaacagattttgactaatgtcttctggtgcttccaagaaagagtaggggtagatgcagaaaagaaaacaaaggctcagttaaatattttatttctttaccctaataatttatgtatgtctcaaaatcaaggttctattaaaatatgctttaaagaagtgatttttgtaatttggcatttgtcctctcagaaataaagaggatattatattttctctgtgacatttggtatactaagcacacttaagtttagtaattcacagatgcagtgctaaattaaattgtctgtctgaaaagcagttggaaaaagcagaatggcttgcaggaaacgagtgtgttagttttgagatttcttttctaatcctctgaggcaaatgcgtaccaaagttgactccaaagataaccccaagagtaaatctattgtgcacatttgttttcttaagagggctattttaggagtccttaatatgaaacaaaaccaaacactgaaacagatacggtacccaggctgattactgtctcacaaagtcaaagaggggaggattagggaagtgaaatcgtagttgattgtctgctatctggactcttgagtccccactctcctgtctatgcctatttttatgcacctgcataattattttttcttaataaaaatcaccatcattttatattgttgaattggaaacaaaaccgattcctttcagtcaccctctggtttaagcactggtaactggcgctagtttatattggctgcttgccaaacgaaagcaattatgtgtaataatagaaaaattaagaggtgagtgttgctgttttacagcaggacatggcaaaaaccatttccttctgtcagcagtatcttgattacactctcacacacagtctcactcctttgtaccacatgcgcacgcgcacgaatgcacaacacacattatttcctgtgggttttaacttgaggtcactgaaaccagaaagaggaagaatgcaaaccacagcttttaaaagcaaatgagaatagaactttgctggcaaaaaaaagagaaaaaaataataagtgaactggaaataacagtaatcagtggtaactatgatcctttttcatcccctgcctcctgcaggtgtcctagtggtcaatgtcacgtggaggaacaaaacgtacgtgggaaccctactggactgcaccaagcacgactgggcccctcccaggtatgaacagggccttttatttctctccttccccatcctctctttgcagggaaactgtagagagagattcataatacataaaagtgtgcctgtaattgaaaccaggcaaaggagaaatgagcaatttaggattgaacgcagtaaaatgcagatgctaaatttcttttctatcagaagatctctgctccccaccccttctctcctgtctttgttttcattttttctcaaagtgggaatttgaactggtttggaagctagctacttgagctgtttttctttggtttttctgaggaagaatataagcccttggtcgcctgttcttttgcaggtgttggaaattgtcagtcttttccttgactgggcccagccctgaagctactggagtgttgactcctctttactgcattgtgtactttgtgatttcacctggctcttttggggatgctcattttcacatctgttacttgcttccataggttttgtgagtcaccgacaagtgacctggagatgagagggggccggggcagagggaagagagcgaggtctgctgctgctgccccgggctccgaggccagcttcacagagtccagagggctgcagaataagaacagagggggggccaatgggaaagggaggcggggcagcctcaatgccagcggacgaaggacacccccaaattgtgctgctgaggatatcaaagccagcccttcctccaccaacaaaaggaaaaacaagcctccaatggagctggacctgaactccagctctgaggacaataagcctggaaagcgtgtccgcacaaattccagaagcactcccactacccctcaagggaaaccagagactacttttttggaccaaggctgctcttctccagtgttaatcgactgtccccacccaaactgcaacaaaaagtacaagcacattaacggcctgaggtaccaccaggctcatgcacacttagacccagaaaacaagctggagttcgagcctgacagtgaggacaagatctcggactgtgaggaaggattgagtaatgtggcacttgaatgcagtgagccaagcacaagtgtatctgcttatgaccagttgaaggcaccggcatcccctggtgctggaaacccacctgggaccccaaagggaaagagagagctgatgagcaatggcccaggttccattattggtgctaaagctgggaagaattctggcaaaaagaagggccttaacaatgaactgaacaaccttccagtaatctccaacatgacggctgcgttagacagttgctcggcagcagacggcagtttggctgctgagatgcctaaactggaagcagaaggattaattgacaagaaaaatttaggagataaagaaaagggcaaaaaagctaccaactgcaaaacggacaaaaacctctctaaactgaaaagtgcccggcccattgcccctgccccagcccccactcccccgcagctaatcgctatacccactgcaacctttacaacgaccaccactgggacaatacccggactgccctccctcacaacaactgttgttcaggctacaccaaagagtcctccgttaaaacccattcaaccaaagcccacaattatgggagagcccatcaccgtgaacccagctctggtgtcactcaaagacaaaaagaaaaaggagaagcgaaagctaaaggacaaagaagggaaagagacgggaagcccaaaaatggatgccaagctggggaaactagaggactccaagggggccagcaaagatttacctgggcattttttaaaggatcatctcaacaagaatgaagggctggcaaatggactgtcggagtctcaggagagccgcatggccagtatcaaagctgaggccgataaggtttacactttcacagacaacgctcccagcccttccatagggagcgcctcgaggctggaatgcagcactttggtgaacgggcaggcaccaatgggcacctctgcatgtgttgacccagaatggggcagagagttcagctgcaaagacaagcagcccggcctattcagacatatctgatgctgctgacgatggtggttctgacagcaggtcggagggtatgagatcaaaggccagttccccatcagatattatttctagtaaggacagtgttgtaaaagggcattcttcaactacagcacaatcatctcaactgaaagagtcccattctccctattaccacagctatgatccttattattctccaagttacatgcaccctgggcaggtcggtgcccctgcagctggaaatagtgggagcacgcagggaatgaagatcaagaaggagtctgaggaagatgctgaaaagaaagacaaggcagagcagttagattctaagaaagtggaccacaattctgcatccttacagcctcagcaccagtcggtgatcacacaaagacatcctgccctggctcagtcactttattatggccagtatgcatatgggctctatatggaccagaagtctctgatggccaccagccctgcctatagacagcagtatgagaagtactatgaggaccagaggctggcagagcagaaaatggcccagactgggagaggagactgtgaaaggaaaagtgagctccccttgaaagagctgggcaaggaggaaactaaacagaaaaatatgccatcggccacaatctcaaaagctccctctactccggagcctaacaaaaaccattctaaactagggccatcagtgcctaataaaactgaggagacaggtaaatcgcagcttctctccaatcaccagcagcagcttcaggccgacagcttcaaagctaagcagatggaaaaccaccagcttattaaggaggctgtagaaatgaagtctgtcatggactctatgaagcagacaggtgtagacccaacctcgagatttaaacaagtaagattgtggagcgtggccccaacagggagagagcagtctgagacttgtattatacatgtctgggcttgatctggttagacttctgacacaggaaagaaacccatattagttttttcctctgctcttgaaaaatatcttaagattctcaggagttactatgtagctctaaaatgtacattatcagtattttcttgtcatggtgtatagtaaaaggaactgtggatgggtgctttgcagatttgtgtttcatgccactaacttgctctgtgactctgatgaggtccattaatttctttttttaaattttttaaattttttgagacggaatctctctctgtcacccaggctggagtgcagtggtgcaatcttggctctctgcaacctccgcctccgttcaagcgattctcctgcgtcagcctcctgagtagctgggactacaggcacgtgccaccatgcccggctaattttttgtatttttagtagagatggggtttcaccgtgttagcgaaatggtctcgatctcctgacctcatgatccgcccaccctggcctcccaaagtgctgggattacaggcgtgagccaccgcgcctggccaggatcccttaatttcttagtccaaggcgagggctttccacaatggggctgctgaattctgttctaactctgagattctgagtcttatctctgaaatatttattttccattttcaaatttctactagcatcttctttgaagataataaaaactgggtccctgaattcacatttcccattaatctttttaatagaatttggggcccaaatttctttcacatggggtcagagatgcctagatttcagtcttactccctatattaagtaccccaaaactcagagctcagtgctgaatgtttgtgaggagggtgaggaggtttgggtggcaggcctcaacagctgtcccagagccccatgggtcagtcagcttgagaacacctgaaaattggtcaccacgaaaccacaaatgtactagcaccttctgtcatggttcagacatcctgacccactgcaaccccgtgagcattaatcctggttatttcccagcactgcacatccccactcccaccctcacccccatgcttagataatccctggtgcattagagcaagaaccaccagcccccaccaccgccacccacacacacacatttacttaggcacaactttgcatgttctctgagaacctgaatccccagtgggtttatatcatgaatgggatggggatcacaaaggccatttaggattctcagtttccccacttacagaggcataaatcaggctgtcaattcacagggctgcagaagatttatataattttgggggtttatagatagatggctttgttttccaatagagaagccataacgtgtgctattaatttgaaattttgttttgattaagatgttaacacgtaatgagaagtgagccaatatattaagcctcagctgcagtagatgaggaaaatgtattaggaaaccaagagtttttcctcctaagtgatgttaatagctatagcaattacttaaatttactattattagcttgagttggagtttttaacattcttttcacctgtgtgagatattaaaaggcaaacgaagacagaattaaatatgtctgaggatgttatttagtgttgagaaatgacattaagggcccagctctgaatttcagcagacctgagtttgaagcccagctccacgactgggcagcagcatgaccttgatgttgcctgaactttaaacactttggttttatcttctgtacaggggatcagtaataatgcctacctgggacattattactttgtaagagaaggaggtaaagcaattagcacagtgtctagcacagaaataaatgtcaacttagcattaaaattaagagtgctagtgctgtcatgattattaacaagttttctttaaaattgaaattttaaaacaaatctgttgggttttttttctttaaaacaaaaaaatcaggacccagattcaagaacatggcatcattatgtataccagcccaaatatctggatcagcaaaagtcagaagaacttgatagagagaagaaattaaaagaggatagtccgaggaaaactcctaataaagagagtggtgtgcccagccttcctgtatcgttaacaagcattaaagaggagcccaaagaggccaagcatcctgattctcaatcaatggaggagagcaagctgaaaaatgatgatcgaaagactcctgtgaactggaaggactctcggggaacaagagtggctgtctcctcacccatgagtcagcatcagtcatacatacagtacttgcatgcttatccttacccacagatgtacgaccccagccatcctgcataccgggctgtttctcccgtcctaatgcacagttatcctggtacgtgttgtcggttctgactatattggaggaaagaggcgatgttcaaatattagctgttaaaaactcaagataaattagaagcttcaagagtgacatttgttttccttgtttttatgctgtttaaagtcccaaagataaaactgatttaatataagtttttttaatgaaatgtcaagaatcctcagccatagtttccatagtctctgatggtctgctatagctgttaggctgacagatactttattgcctataaaaatattctaagcacttactgtcataatcattatagttactattcctttcacttaagcggacacgtaaatgtatgaaatggctataagctcaattctgtttataacctcccttcatcaggatgaattaactgggagaagaaaattggagaagctagacacagtttaatgatgatgtagcccattcttaatgtaaccccctattttaagatctctttgactcttatcccaaattcatgtaacccaaatgattttttttaaagatatagcctgtaacttgatgtggcatttgttgtttatctgcaggggcatatctctctccaggatttcattatcctgtttatgggaagatgtcagggagagaagagacagagaaagtcaataccagccctagcgtcaacacgaaaacaaccactgaatctaaagcactggatttgctccagcagcatgctaaccaataccgcagcaagtctcctgctgtaagcctccttttgttgttatttaaaagtactgtgatttggggagaaaggggaacaagctagagaacagtcttgaaatataaatggtttcggaacccagctgtgatttcaggatgctgttttatcctaatacgtaaagaatggagcgttcaaaagtaagacgctttcacacatgagagaaaattgttaaagcacgtatggcagtagcaagcttttctgttgcaaaatctagtataccttgcttacccaggaggatggttgttaggtggaaatttaaattcataggaaccaacttttggtgcaaaatatgtttgataagacattgaggaattaggtaacagaggagtatattttatataattttggtaagtaagtagttcagaggctacaaactgttgactttttgggcaaatcaagcttttcaaaaaatgttttcttgcaggataccttttaaaaatcagacattttacatgcaagttcagatcacctctttctcttaagacaatagaaaatctgggccgggagtgagccactgcctgtaatcccagcactttgggaggccgaggcgggcagatcacctgaggtcaggaattcgagacnnnnnnnnnnnnnnnnnnnnnnnnnnnnnnnnnnnnnnnnnnnnnnnnnnnnnnnnnnnnnnnnnnnnnnnnnnnnnnnnnnnnnnnnnnnnnnnnnnnnnnnnnnnnnnnnnnnnnnnnnnnnnnnnnnnnnnnnnnnnnnnnnnnnnnnnnnnnnnnnnnnnnnnnnnnnnnnnnnnnnnnnnnnnnnnnnnnnnnnnnnnnnnnnnnnnnnnnnnnnnnnnnnnnnnnnnnnnnnnnnnnnnnnnnnnnnnnnnnnnnnnnnnnnnnnnnnnnnnnnnnnnnnnnnnnnnnnnnnnnnnnnnnnnnnnnnnnnnnnnnnnnnnnnnnnnnnnnnnnnnnnnnnnnnnnnnnnnnnnnnnnnnnnnnnnnnnnnnnnnnnnnnnnnnnnnnnnnnnnnnnnnnnnnnnnnnnnnnnnnnnnnnnnnnnnnnnnnnnnnnnnnnnnnnnnnnnnnnnnnnnnnnnnnnnnnnnnnnnnnnnnnnnnnnnnnnnnnnnnnnnnnnnnnnnnnnnnnnnnnnnnnnnnnnnnnnnnnnnnnnnnnnnnnnnnnnnnnnnnnnnnnnnnnnnnnnnnnnnnnnntgagagctgtgtctgctgttttctggccttgactctttgtcatgtccctttaactctgctgaagtaatacaatgtctgtgaaagatggctcttccccaaaaaaggtgactgctctagtcctagagactgttgtgaagagagactaaacaaaaataggatggtgcttggctaggaaagagtttaaagtaaattaaaataatagtatctgcaatgtgtgtgagtctaccagaaactctatagagaaaccagaaaaggggatttctgaatctttttctgagtcctccttcttagtacaaggatttcttttaagtgagaagtataactttagttaaagggtggttaggctgtaaaggtagaaagtcataggaaatgaaccatccttaccccaaactatggtttgggaggatggggccttctctttgagagttcaaaaattgagagattcaaaatgtgggtgtaggacagtgatttcttgtgctttatattggcatataactttagagcatgttttttcagtagaacaaaatgtatacagacacgtttaaaactgtgagatatgttctctccacaaaatacaagtgtaattagaaaacttgaccttaaagatatctccaaaactacttattttgtaaaagttgtttatgggaagcaattgggtaaattcttaacctgcaattatgaatgaatatagagagaaatcctcttatttccgtcatttcaggaaaacattggtgtcacttggtttactttgggtggagtagttcttttgtgttggcttaattccaactgaaactaatgcatgttttttgaaattctctttagttactaaagaattgtatctttatatttactttttaatcattaacacaatattgtcgaagggacaaaggtggtttagtactcttaaaagttgattttcagagcatgaagggggaaaatttctcttttctgttgcagcctgtggaaaaggctacagctgagcgggaacgggaggcagaaagggaaagggatcgccactcccccttcggccagcggcacctgcacacgcaccaccacacccacgttggcatgggttacccgctaatcccgggtcaatatgacccttttcaaggtcagcagctctatcattactgtgtctttgtccattctgctttggaaaacagttgctaaaattgcatttcacatcttaaaaatattgagctttgagttcacattagctctcaggagggtttttaacacttattttctagtgacacagctaaggctattcccacatctttgtattctattgagacatgaaatggctaccacttaataattgtcaccagttgatgttatcggcagcttactgttatctcacagactgagggcggtggccagtgtctggggcactgaatataacaatcagaagatcagatatctacttcaggaaaattgtagaaaaagggagggatggtgggaagctttggtgaaattacttgttctgatttctgcatgccttttaagttgctcttttcccatggaaatcatgggagtaatgtgatcaggtttaacacttttataacctcattcgagggttcttcacagcccttcactgctgcgacttcactaaatgggagaattgagaaagagaaacatgttttaagccataggattgatatgagggaatcttcaccttgtagttcattagttgagcatgtattatttgtcccatctttgtcatctcatagtaggtgggtggtggcaccatctttacaacttgctagaataccacagattgcatggctttaaacaacaggaatttattttctcacagttctggaggctggaagttcaagatcagggtgccagtacagccagcgtctgctcaggcctctcttcctggcttgtgtgcagctgctgtcttgctgtgcgctcatatgacctcttctttgtgcatgagctggtgggtggggaaggggcaggggggagccctcgtgtgctttcttataaggacactaatcatgccctattagggtcccacccatatgacctgatttaaccttaattacctccttataagccccatctccaaatctaatcacattgtggattagagcttcaacatattttgaggagacataatttagtctattgcacttgccaagttgcctcttatgctactgtgtgaatagaaagtaagataatatgtttgaaggtgtttccaaaactgggaagtgatatacaaatgtgaaggggtcatttttatttattcaggtctttttagttgatgtcatctagtagtgttaaaagagagctttcctatttcttaaacaatttgtattgagtgtaataagaacttggaagagaaagaggttttatttctagtctaacacattatatctatatataaataaagtatatatgagaagaaaacaattgtctcttttaagataatattattgttattgtactgtcttaagttacctctgggaaaagaaaatatatccaaataaaagacctagaaggagacagtaatcttccctaggtttgcatttgtttactctatttttccccaggactgtcttctatagaatttaaaagaattctctgttaggcaacatcatgccatttggagctattacagtctctgactgctacctttgtcttgcagggtgaaagttaagagcatttctaagtttgatttactgattctgtgtatcttatgggatgcattgtgttcagtcactggggaaaatgttaaagtgataacaattattatgaaagtattgtattctaggcaaatagcatgccgcttctgtaattcactgtgacttttgattcctgttgttacctggtatctgttatttctcctgagcttcctattcagggaatgcatgcaaaccatttagcaccatgcagagccggagagatggaatgctgtatctccttcgaatagctattaagaaaactgcagagtattcaagaaaggatagatagcagatagaccaaatggtttgtactgtgtccttgctgcatgaaacagttcatgtgtgtgtttaggagaggacaccatgctgctactaggtctgcggcccttctccactgggcctgtatctactcttatccttctaaagatcacagacactctacattttttccccattaggcttgacctctgctgcccttgttgcctctcagcaggtggctgcccaggcatctgcatctggaatgtttcctggacaaagaaggtaaatatcctctacatttttaattagttgtagatagaaatatcttaatggttgggaggaagcaagtacaggatttttagaccaaaaacttaactccttgggttttatatcattgtaatgaatgtgtttattatgccaatataagttgcttcacatgcaacttaaattccatgaacctcattctgtaagggttacatagattagtaattaactgattggttttttagacagttgaaattttcttgggttatccttacggcatttctaaaataattcaccatgactccctttgttttattatgtttaaagataaagtcgcaaatggagacatttattttcataatgctaaaggtaatgtttgttctttgatattttaaattattccctaagttttatgaaggaaaatgatttaaaggaattaaattattaatattataaaattaatatttttcacaatgtatatcattactttatgtttattcactttctctggaattgaagtccacatttgaatggaattaaaataagactatcggtcttatggttttctggtttacagtgccaaatgttgatagaggctgggcatgatggcccatgcctgtagtcccaccactttgggaggctcatgcaggtggatcacctgaggtcgggagttccagactagcctggccaacatggtgaaaccccatctctaataaaaatacaaaaattagctgggcgtggtggtgtgcgtctgtaattccagctactagggaggctgaggcatgagaattgctggaacccaggaggtggaggttgcagtaagctgagattgcaccattgcattccagcctaggtgatggagtgagactctgtctcaaaactaaaaaaaaaaaaactgttggccgggtgcggtggctcatgcctgtaatcccagcactttgggaggccgaggtgggcagatcacctgaggtcaggagcttgagaccagtctgaccaacatggagaaaccccctctctactaaaaacataaaattagccaggcatggtggcacatgcctataatcccagctactcgggaggctgaggcaggagaatcacttgaacccaggaggcagaggttgcggtgagccgagattgagccgtggcactctagcctgggcaacaagagcaaaactccgactcaaaaaacaaacaaacaaaatgttgatagaaccgtgtgctaaggtttgcttttcttttgcagagaataacaagattggacatgtacattgtcatgtgactggatcacatggggaagcgctttatacagacatcagttccatggtgttaatttgaaatgccttaatggcaggcaaaaaccagtcatttcatttttgtaaattacagattttatcacagagtaacaaatgttgctgtaattaaacttctgttttatatatatatacgtatacatatctgtatatatacatatatatatatataaatataaatatattctttactttttgtatcagtaaccaggctcgcacacacagggtctgctgccacgtcgcaaaccactcagtaaaggaaattaaaaatgtatttgtcatgttaaaaagtgttagccacaaaaggctacttactttcttttccttttcctttaaaattgtaaataaataatgttatgtatcagtgtgcctgaaccttgcatatccttcacatatttcccataagcccctcagaaaggctaactgtgatgatgacactttggtacaatttagatgtctatttggtggctcctgttaaagacgcaccagtgtaaaatgttcctgtagtcactgtttgtacttgtgtattgtggaaaaagtacttttggaaggcatggggttgccagtaccacaaaaactgtgttgtatataatgtaaagattaaaatggggaaataatgagcatctgtgaataatgaggtgtcattttttgataatcttgaatggcaaataacccaatagcctgcgtaccagagacatctgtgattgttctattacttgaatagttctacagtctttttttttttttttaatgtttacaattatccagttttagaagagagagactttaacgccattgcctggttacttgttttatgctgtaatctagtttattttatgtaaaatgtatattgaatgctttccttttttatacctgccttaaataatttggcaatcagaattaaaaagtttttttttttttaaataatggcttcttgtctgtctcatgttattttctacctggctgatagtcattctaattttcaaagaagggtttcttaatattattaatatccaatgcataagatacagtaaacagatattaacttttcttataggatacataggtataacaaccaaatagtgtgtttaattcggtgaatgtattcccatttacagggtatttaccctaaacatggagcacgatatcactagaaattagtagatacaggtttctatggtatggaatgatacttcaaagatgcaaatgttatgacatgtggataacaggaaaaatatgtaaaaagtcatttagtcagttagctgtcattacattgatttactagaatattttatgccaaattttaactgcctcttctctcccttctttgcttggaacaaacacttactgagtgcctgctttatcccaagcactgcactgggttctggcatattgcagtaaacaaagcagacacaaattcctgtcttcatggagctttcattttttggtgggtgggataaacatatcataaaatatctgaataatatatagagcatgttagatggttgataaatgcaatgaagagaaatgaagcatgggagtggggcatagtgaatgtgtgctggagtttgtaactgtaaacagagtggccactaaagagatgggggggatccatgcagacatctgggggaacaccactgcagtgacatggaagagcaagtaccgaagccccaaggtgggagtgtgctttgtatgtttggactggttgatttcagtgctccattccagctgtaagtttttattattttactataattgctaatgacagtgctaccacgtggtttactaaaaagttctttaagctgacggaatttgtcttggtataatttggttagttctacctagaggcctttgcatcagaaatgaatagaattttgcaatcaaaaagaaatgtttcccttgattttgaaagaccaccttagagtattgcctttgctgcttggcttacacatctagtctatgttcttaatagatttcagtaagaagatatttttctgttagttttcagtttttcttttgaatttcatccaagctgtcatttataaaaatatcgtttgtggtgtttaatcctgtacataagagtatttcacatatttttcatcatttttaagctatcaacgctttttcgtttttatacgacatcttgattatccttgaagacttgaggtaatttgtcttataccagttaagcaagtatgttttctctgttcagactatagttggcagggtatctgttggttgcctacatgctgatccagttcttaaccaaccccttaactgtcaaagcacagaagcagaactaaggtcaacttacatcttcactagctgaattttcatgttcttgttggtagctgggtgatactgtggattcctgatgattttcttgctcttaataatatatatggaagccaatcttacctttcagctgcaaaatgactagatgtatgtttattacatagcaggctttttaaaatcacttctaattaggtggttaagtaaacaggttataaatagctgcattggaccatgtttaactctgctcctgtaataaacaggaatgctgataaatacaaagagatatatgaccaaaagcacattgcaatttgaataggctcttcccctaggcttttactggaacattattcgtgactggtttacattaatcactaaatgaagttttgtttcttcctcttactgttacagtgttgtctttgctgatgacaacatgaattgccaaaggccagggcttatttatattacgtgtgccatttctctggctgagtatatagtcagtaccgagtggtaaattaaagattcccaaaagacaagtgtacttggctccattatattactatgatgaatctgccattaatacattctaattgttttacttttatagacataaaatcagtccccttagtgactaataatagggtttattgattttactaaacattactcattccaggcctgctcatatcagcttgtcctgaacatatgcaaaaagcctgcagtgctgacacagtgcaaattaacttcatggagaaatgggagtgaagagttgtttacagctgtggtccccttgaatacagaatattaaaaaccaggtaataggctccatacagaaccatttattcctagattacaatctcagatgactttttcatggaaacttgccattgctgttcagcccaggtcattaacacttgcagagtaaaacgtgtggccttatacattcacactggctgtgaccctgatttagtgtggtttcagcccaagggtctgtgagtaaccagaatgaatagctctgattgatgcaggataaaaacagcagtttaaatgataattactggtcatttcattccttccctgactctgaaagagacaagacaggcaaagccatttattattgtttttgtcactaaccacagtcatccattccctgctttttgcagtagcctgagtcataaatgttgtttactttcagttaactttagaagagaaaacaaagcaaggcccccagtctgacttttcatttttcttaacaaaatcactctttaaagcaaggggtgagttctcaaccttggcactattgacatatgggaccagataattctttgctgtgggggaactgttctgtgcattgtagtatatttagcagtactcctgacctctactctggagataccagtagcaacctccccaacaaattgtgacaaccaacaggtcgtatgaaatttagaactcatgcctagcccctgccccacaggtagagtgctgagttctatcgttctttgttgcttttggagataggaaagccatcgatgtttccttgtaactcgatgtaaacagaatggggatgctcatttgaccaatgtggataaagttggaccagacctctagctctttaaaaagaattggatgacccagattttaacataataattagtagttcttttaggttgaagatgaattcaattttaaaaccacatctgagggctggattcatttcacagcacgtcaattagcagtgctagcccactaaaaatacatattatttcttctggaatgaaggctgtcagtggaaaacctggaaaaaaatggataaatcttaattgagttgctgggattgaattcagattttcttcacacagggagaggcatttctttcatacacaggaacaaactttgagagattctcacatacactatacatttcagtgaagtttttttttttcacttagacatttgaaaataaaatgaaaggaaacatcaaaatctgcaatatggagaaagttaaagtatccagggctatcatgaacacaaggcatgataacacccatggacaagtctaggtttaggtctgatcagactggcctgacccttggccagctgttgtcatgttcctgtctacctggaatggcaagtagtacgatggaacaaagcttctttcctgtgtccataacggacgtggctaatcattgccgcattctctccacctgaatgtgtgtgagacctcataacaagtttctcagtgcagctttcccagtagtccctaaaaaacagaccaaagttgacacgcaacatgaaggctgtttgccacctctgcaagaaactaaactcttatgggactaaatcatgacccctataactttcaagggtgtcaccctcacaaccccccaatttcaggcaaggagacttaacatggcactattcctcctttcaactattggaaactttggaagttatttatttaccttcagtgttttaaagcactgatttcttcagtcagaaaagttggggaaccagaatcgttacttattgacccaactttctactgatttatggaggtgttatctttttctcttttactttcatgctatcatcacatctttggctctcctgccaccctcttataatgatctttgattagatagaatccatccaaataatccagtatcatctccttctctcaacgtcacctgattaacaattttagttccatctgcaatcttaattcccctttgccacgtaacaacagtttcacagattctggggattaggacatggacatctttgggggctaccactctacctgccacaccacccaacacaaatccctttctgcctgggcagtattaacacaataacaatagtataatagttctactgtataatatacaatattacaactggtataatgaccatcatcaaaattatagtatatttactttgcacttcacatgtaagaactcatttagttctcataatcacccaattactattcgcattttagagctggaaaaactgaggcatcaagctaaagtaatttgcccaagttcacaccactgtgtaagtgacaggaccataacccctatgttatactgcttcagagaagggataatacactccctagggaattgacaagattttcctttgctaaagtgcttattatttcagaggggaaaataatggtgtgtctctccaggctgctatgagacaaagcctctgtgcagcctgtgctggagccaggcatcaagcccttgttaaactccacattccaggcccaggatcctgagagcctagcggctcttcagtgcattgctggcagaggttgctgaaaaggttaccttttttttgttttctcattgtcatggcagcccttgcctctttcaatactctaccatatgtatctgatgactagaagctcagaatacaagagttgggcttcacgggaactggtgcttgggtgtcagaggctggtgggaaggctgatgcttttgtgattctggcagagactatcatgggctcctacaaagggtcattccaacgttctgacaaagggccccaaatttgtactttcaattatctacaaatgatgtcattctcactgtctcaggggatttttgaaaatattagaaagaaggatgctcaaacctcagctttaactctttaaataccctcccctaaccagatccttctccagtgtattttgtgtgtactgagggacaagggaatatgtgaaacatacttacttgcaagatgtaaacatttaaattataatttctgcaatgttatattgaaattgcttctttatttcgatatggtgagagcctcaaaaaatgaatgcctagatttttcttggcttctcagaggactttgctctaaatagtatgtgttggggcaaaatacagaaattgattgaaaaattcttcctaataagggtggcaggggccactgaatcaagacatcctggccccatttaatcactggaggtcactgaactataggtctgaaagagaaagtagttccatcttcctcaccactctccagagaaggtagtccagccacccaacctagaccagatcggaattttccagggtgggggaagtggggtggaatccctagcctagtagggatgacctttcagcgtaataaccatggagagggagactgtttctagcaaggctgctgtacagctggatgttttcagctgcctgtaacagaaaccatgactgaaactgccatcaactgcaaggaaatgtgttctctccccaatgctgagccaagagcagggtaatctccagacatcatcctgcatgctgctgactctgcttctctgtgatactctttgctcagtcttccttgggcttgtcccctgtgttatggccacatgagttccagatctctctctggagacatcaatgtccaggggagagaactgtgtcttcctgtgtctcttaggagggaagaaaccttcctcagatgcctctggcaggcatctctcccatatccttggccagaaccaggccacatggtgactcctgaaacattacaggaagagaatgggattgccatgagttcctcaggctaagaaggatgagaatctgcccctgagtcatgcatgggaggagtggctcatggcttagaactaggattctgttggggagaacgaagcgggggatgaatgttttgtctgaggcatgaaactttctttgaggccagtgaaacgtggtagaatctcttagtgtcctctgggttctcctgaggtgtgagtctgggatgggtgctggtgggaggcagacagttgtttacactccagcagaactcacagagaccctccgctgtaactgacttttccttagagaatctggtgattgggtagaattaggatagcgggcacagggctgcactgaacgcactgttccgaaggaacatgaagagattcagaaacctaccgtctttcttttctctctcttccatgacacagctgagtaagactctatgggtaggaggaaaggtgccactctcttccaccattccctagcacacacgcacacatgcatacacacacacacacacacacacacacacacacacacacactctgctcttcagaggttccccagaacttacagcctataagaaagaacagggacctaccttctcccccaaagcaagttctgcactctggacagaaaagaggaactcaggaccatttttactagaatttagacataattaggaggggtgggtggaggggtgaagggactggaatgttaggaagggcaagcgttgagccctggtataccaaaattggaaagagaaagaacaaattagcccactggcagagggagaatctcaccatatcaggaacaagggagattccttcaggagaaagagaaaccaggctttagcttggggtctctgacttagagttatcaacgttaggaaagggcgttgaccaagtctcagaaagccatctcactcttgctggaagggaaagaatgggtgggcaacccctagaacttccagctgggtgggggcataatcctctctgcctttggccctctctccactctcagcagagcagaatgtgtctggtagggaagaagataaaggactggcctcattttcctgcccctctaccaacctgaatttgtccctgattgggtgagtggtgggcgagtgacccacccagcagatctagtgactgcaaacccttggggtagggttaattccttcaaaagaaggaattttgaaagtgggtgagcaggtcatgagacagaattcattcaggaagtatttcctgagtacctgtgaggggcctaggtactgggtgcccaggtcctgtgtcctggggatagggtgcccaggccctgccctctcccacttatagacagagtggggcaccccctcccacctctggatgagcacatagatgtctccgtaaagctgagcaaagctgaactctgcagacctagtgctggccaagaaggtctgccatgaagacaagcactcactgtgagactctgcctcgaaagctcataaacctgggagcctgctgtgctcagcctcagaaacccccaggtgcccgtgtgtctgccatccccagcccccaccatcccctcagtgataagatactgggaggcagaccataaaaggtggattttgtgacaacagctcggtgaccagaccgttccctctgctgagggctgctgagggctgaagcagggatgactcatggagaggccccagcagacagccgaggaagcctctgaccctgcggtgctgtgggctgggccatcacgggacactggggagccacagatgtgctcagaggtagggatatgcggtgagtcactccacccctgtcaggcactggcaggggagctgaggagtcagaagcagagagagccagcgccgagctcgcccggtgcctgtgagcagccagcctctaaatggcttccagcttgacagtcctcacactgtggcaatgtagcttctggaagcctatggggcccagggacattcctctgactgactccagtggatgaggtgtgctcagggtgtggtgggtgagcaagtggccttcccgggtcagctagagggactcccttgtcatcgtccagtggtggaaattgatgaattggcacctaacatgaatgcgatatcctcctgggaggctgagaatctctaatcttgtcccactcgatgtcagcaactccgcaggcctggaagcctccctctgaatgcttagcagggctcccctgtgtatctcctgctttccagggccactgtgccttggtcaaggatgtttaaggcgtaaatcacagaaatctattcaagcaaatgtaagcaaagtagacagatgtaagaacagaggggttcttacaggagcaagggtggcaagtgtgtccaagcttcctaggggctggcactggtgggacctgggaggtctaggcaccatggaagcttctctctcacacacatcgtggcttgttttgtcgctgttactcctcctctgcctcattcctctctctgcacactggctctctctgattctccaaacacatgacctcgcctgactggcaatactctctgtcatcttccagttctaattgcagattctcaagagaaaggatggaagtggccaggcccaggggccacaggatagaatgaacttgctgagggagtggaggctgggcagtgtggggcgggaacagttgctaagctggctcctatttttggcttcttttgactccccacaccactttcatctaagccctttgtcgaaggaatatttatgactaggagcagaagttcacgcaaaccagcttagttacaaagaaggtttattgaaagcgtataagaatccgtctcactatccaaggataggaagggaattggcaggtcatagtggttgttggtgtctagaaaatccctaaatctcgctcaaatatcacataatctcttaccccttcttctcttggtgtctctgtcccgttctcccgcttctgcagacagaccgtttctacctctttgtgacttccctattcttgtaattgaacgtggcctgaaattgctatggagctcacaagggctcgtttctcaccatcatttaactgacctagcctttcagtttgcactccaaattcctgtgccaagtgcagtggatttccatccaaggaataaccaaatgtggctgggccggatttgggagaggcgtatggaattatataggactgtcaacactcctgtgattccaagggttttaggagctctgtgccagcaattgtggggtggcaaag

SEQ ID NO: 87 - DNA, 2159 bp, Homo sapiens
gtcctttcttcttattctttcttccctttcactaatttatcccgatgttagcacattctgtctcgttactagcggacgcctgtaggtttgctacatgggatcattactgatcacggtgactctgaagtctggaactgaaggcggaatgagaagttgggaaaacttttttctctaaactctctgttttttaaaaaactattattctcgatgcttgttaagaggaaaaaaaaacctttggtgcttctgttgtgaatgtgaaacattattttccagctgtacagtgacacattttttttaaggagaaaaggactgattcgtttgccaaaaggggggtggggaggtggaataatgttatcgagtgattattctggctgagatgtgttatttggtttcttccttcttgatcatttggtgtttaagtaaaatgaggcacaggcttgtttgccgagtggagtgggaaaggcattttgatttgctggcctaattaaaaaatgataaaggattaaaaggaaaaggtggacctggactgagggtgtaaaatccctggacacattcgtggggcaggaaaaagaagaggaagattagaagattttttttttctttgagagaaagcccagcggagataaacgaatgtcccctcatctccaaagaaaagttcatcggatttttattctagagagctcatcttcaggatgtcagtgaacatttctactgcaggaaaaggtgtggatccaaatacagttgatacttatgacagtggcgatgattgggaaatcggggttggaaatttaataattgatttggacgctgatttggagaaggacagacagaaatttgagatgaataattccaccaccaccactagtagcagcaactccaaggattgtggaggtccggcctccagtggggctggtgctaccgcagccttagctgatggcctaaaatttgcttctgttcaggcctctgctccccaggggaattcacacaaagagaccagcaaatcaaaagtgaaaaggagtaaaacttctaaggatgctaataaatctctgccttctgctgccttgtatgggattcccgagatcagcagcactggcaagaggcaggaagtccaagggcgccctggagaggcaactggcatgaattcagcgctgggtcaaagtgtgagcagcggcggcagcggcaacccaaacagcaatagtaccagcaccagcacctctgccgccaccgcgggggcaggctcctgtgggaaaagcaaagaggagaagccaggtaaaagccagagcagccgaggcgccaagcgggataaggatgcggggaaatccaggaaggacaagcacgacctgcttcagggccaccagaatggcagtggcagccaggccccttccggggggcacctctatggctttggggccaagagcaatggaggtggcgcgagccccttccactgcgggggcactgggagtggcagcgtcgccgctgcaggggaagttagcaaaagtgccccggattcagggctcatgggaaactctatgttggtaaagaaggaagaggaggaggaggagagccacaggcgaatcaagaaactgaaaactgagaaggttgaccccctgtttacagtgccagcgccaccaccgccgatttccagcagtctcacgcctcagattctaccctcctacttttccccatcttcatccaatattgcagcaccggttgaacagcttttggttcggactcgttctgtgggtgtcaatacatgtgaagttggagtagtgacagagccagagtgtcttgggccctgtgaacctgggaccagtgtgaatttggaagggatcgtgtggcatgaaacagaagaagactccaggtttcccttgagcctgtattgagacggtgaatttcgttctgagggttctgcgtgggccggcgtgttgtgtggagccgcgtggcgcggggagcgcagcacggtcacgcagaccgaagctttcactgcacggccggactcgttagtgcgaatgagcctgtgtcccgcgtgcaccgagggagccgagcagcgcaggcggccctctagccccgcacggccagcgcgccgtgggggatgcgtccctttgcctccgccacgctcacctctacccgaccgctgcctctgtgctccgggcggccgc

SEQ ID NO: 88 - protein, 392 aa, Homo sapiens
MSVNISTAGKGVDPNTVDTYDSGDDWEIGVGNLIIDLDADLEKDRQKFEMNNSTTTTSSSNSKDCGGPASSGAGATAADGLKFASVQASAPQGNSHKETSKSKVKRSKTSKDANKSLPSAALYGIPEISSTGKRQEVQGRPGEATGMNSALGQSVSSGGSGNPNSNSTSTSTSAATAGAGSCGKSKEEKPGKSQSSRGAKRDKDAGKSRKDKHDLLQGHQNGSGSQAPSGGHLYGFGAKSNGGGDFHCGGTGSGSVAAAGEVSKSAPDSGLMGNSMLVKKEEEEEESHRRIKKLKTEKVDPLFTVPAPPPPISSSLTPQILPSYFSPSSSNIAAPVEQLLVRTRSVGVNTCEVGVVTEPECLGPCEPGTSVNLEGIVWHETEEDSRFPLSLY

SEQ ID NO: 89 - DNA, 2176 bp, Homo sapiens
gtcctttcttcttattctttcttccctttcactaatttatcccgatgttagcacattctgtctcgttactagcggacgcctgtaggtttgctacatgggatcattactgatcacggtgactctgaagtctggaactgaaggcggaatgagaagttgggaaaacttttttctctaaactctctgttttttaaaaaactattattctcgatgcttgttaagaggaaaaaaaaacctttggtgcttctgttgtgaatgtgaaacattattttccagctgtacagtgacacattttttttaaggagaaaaggactgattcgtttgccaaaaggggggtggggaggtggaataatgttatcgagtgattattctggctgagatgtgttatttggtttcttccttcttgatcatttggtgtttaagtaaaatgaggcacaggcttgtttgccgagtggagtgggaaaggcattttgatttgctggcctaattaaaaaatgataaaggattaaaaggaaaaggtggacctggactgagggtgtaaaatccctggacacattcgtggggcaggaaaaagaagaggaagattagaagattttttttttctttgagagaaagcccagcggagataaacgaatgtcccctcatctccaaagaaaagttcatcggatttttattctagagagctcatcttcaggatgtcagtgaacatttctactgcaggaaaaggtgtggatccaaatacagttgatacttatgacagtggcgatgattgggaaatcggggttggaaatttaataattgatttggacgctgatttggagaaggacagacagaaatttgagatgaataattccaccaccaccactagtagcagcaactccaaggattgtggaggtccggcctccagtggggctggtgctaccgcagccttagctgatggcctaaaatttgcttctgttcaggcctctgctccccaggggaattcacacaaagagaccagcaaatcaaaagtgaaaaggagtaaaacttctaaggatgctaataaatctctgccttctgctgccttgtatgggattcccgagatcagcagcactggcaagaggcaggaagtccaagggcgccctggagaggcaactggcatgaattcagcgctgggtcaaagtgtgagcagcggcggcagcggcaacccaaacagcaatagtaccagcaccagcacctctgccgccaccgcgggggcaggctcctgtgggaaaagcaaagaggagaagccaggtaaaagccagagcagccgaggcgccaagcgggataaggatgcggggaaatccaggaaggacaagcacgacctgcttcagggccaccagaatggcagtggcagccaggccccttccggggggcacctctatggctttggggccaagagcaatggaggtggcgcgagccccttccactgcgggggcactgggagtggcagcgtcgccgctgcaggggaagttagcaaaagtgccccggattcagggctcatgggaaactctatgttggtaaagaaggaagaggaggaggaggagagccacaggcgaatcaagaaactgaaaactgagaaggttgaccccctgtttacagtgccagcgccaccaccgccgatttccagcagtctcacgcctcagattctaccctcctacttttccccatcttcatccaatattgcagcaccggttgaacagcttttggttcggactcgttctgtgggtgtcaatacatgtgaagttggagtagtgacagagccagagtgtcttgggccctgtgaacctgggaccagtgtgaatttggaagggatcgtgtggcatgaaacagaagaagtatttcagctagtacaagggaagtgcctattagaagcaatgggccgcttgaggacatggattgcatccagtagtggcgcattcaccaaaaggcagatgaaaataatctgtaccaacaaggatcacaacaggaaacatcatctgaattttccactattgacaatcttgactatctagcctgggatttgcattgccaagcaacacgttaaataattttgtatctctttgaaatcaatttctggtgatcacacatgcagattgaaaactatggctttaagatttacgttcagtgaataaaatttacgttccctgaaaggcaaaga

SEQ ID NO: 90 - protein, 441 aa, Homo sapiens
MSVNISTAGKGVDPNTVDTYDSGDDWEIGVGNLIIDLDADLEKDRQKFEMNNSTTTTSSSNSKDCGGPASSGAGATAADGLKFASVQASAPQGNSHKETSKSKVKRSKTSKDANKSLPSAALYGIPEISSTGKRQEVQGRPGEATGMNSALGQSVSSGGSGNPNSNSTSTSTSAATAGAGSCGKSKEEKPGKSQSSRGAKRDKDAGKSRKDKHDLLQGHQNGSGSQAPSGGHLYGFGAKSNGGGDFHCGGTGSGSVAAAGEVSKSAPDSGLMGNSMLVKKEEEEEESHRRIKKLKTEKVDPLFTVPAPPPPISSSLTPQILPSYFSPSSSNIAAPVEQLLVRTRSVGVNTCEVGVVTEPECLGPCEPGTSVNLEGIVWHETEEVFQLVQGKCLLEAMGRLRTWIASSSGAFTKRQMKIICTNKDHNRKHHLNFPLLTILTI

SEQ ID NO: 91 - DNA, 3255 bp, Homo sapiens
aaggacacccccaaattgtgctgctgaggatatcaaagccagcccttcctccaccaacaaaaggaaaaacaagcctccaatggagctggacctgaactccagctctgaggacaataagcctggaaagcgtgtccgcacaaattccagaagcactcccactacccctcaagggaaaccagagactacttttttggaccaaggctgctcttctccagtgttaatcgactgtccccacccaaactgcaacaaaaagtacaagcacattaacggcctgaggtaccaccaggctcatgcacacttagacccagaaaacaagctggagttcgagcctgacagtgaggacaagatctcggactgtgaggaaggattgagtaatgtggcacttgaatgcagtgagccaagcacaagtgtatctgcttatgaccagttgaaggcaccggcatcccctggtgctggaaacccacctgggaccccaaagggaaagagagagctgatgagcaatggcccaggttccattattggtgctaaagctgggaagaattctggcaaaaagaagggccttaacaatgaactgaacaaccttccagtaatctccaacatgacggctgcgttagacagttgctcggcagcagacggcagtttggctgctgagatgcctaaactggaagcagaaggattaattgacaagaaaaatttaggagataaagaaaagggcaaaaaagctaccaactgcaaaacggacaaaaacctctctaaactgaaaagtgcccggcccattgcccctgccccagcccccactcccccgcagctaatcgctatacccactgcaacctttacaacgaccaccactgggacaatacccggactgccctccctcacaacaactgttgttcaggctacaccaaagagtcctccgttaaaacccattcaaccaaagcccacaattatgggagagcccatcaccgtgaacccagctctggtgtcactcaaagacaaaaagaaaaaggagaagcgaaagctaaaggacaaagaagggaaagagacgggaagcccaaaaatggatgccaagctggggaaactagaggactccaagggggccagcaaagatttacctgggcattttttaaaggatcatctcaacaagaatgaagggctggcaaatggactgtcggagtctcaggagagccgcatggccagtatcaaagctgaggccgataaggtttacactttcacagacaacgctcccagcccttccatagggagcgcctcgaggctggaatgcagcactttggtgaacgggcaggcaccaatgggcacctctgcatgtgttgacccagaatggggcagagagttcagctgcaaagacaagcagcccggcctattcagacatatctgatgctgctgacgatggtggttctgacagcaggtcggagggtatgagatcaaaggccagttccccatcagatattatttctagtaaggacagtgttgtaaaagggcattcttcaactacagcacaatcatctcaactgaaagagtcccattctccctattaccacagctatgatccttattattctccaagttacatgcaccctgggcaggtcggtgcccctgcagctggaaatagtgggagcacgcagggaatgaagatcaagaaggagtctgaggaagatgctgaaaagaaagacaaggcagagcagttagattctaagaaagtggaccacaattctgcatccttacagcctcagcaccagtcggtgatcacacaaagacatcctgccctggctcagtcactttattatggccagtatgcatatgggctctatatggaccagaagtctctgatggccaccagccctgcctatagacagcagtatgagaagtactatgaggaccagaggctggcagagcagaaaatggcccagactgggagaggagactgtgaaaggaaaagtgagctccccttgaaagagctgggcaaggaggaaactaaacagaaaaatatgccatcggccacaatctcaaaagctccctctactccggagcctaacaaaaaccattctaaactagggccatcagtgcctaataaaactgaggagacaggtaaatcgcagcttctctccaatcaccagcagcagcttcaggccgacagcttcaaagctaagcagatggaaaaccaccagcttattaaggaggctgtagaaatgaagtctgtcatggactctatgaagcagacaggtgtagacccaacctcgagatttaaacaagacccagattcaagaacatggcatcattatgtataccagcccaaatatctggatcagcaaaagtcagaagaacttgatagagagaagaaattaaaagaggatagtccgaggaaaactcctaataaagagagtggtgtgcccagccttcctgtatcgttaacaagcattaaagaggagcccaaagaggccaagcatcctgattctcaatcaatggaggagagcaagctgaaaaatgatgatcgaaagactcctgtgaactggaaggactctcggggaacaagagtggctgtctcctcacccatgagtcagcatcagtcatacatacagtacttgcatgcttatccttacccacagatgtacgaccccagccatcctgcataccgggctgtttctcccgtcctaatgcacagttatcctggggcatatctctctccaggatttcattatcctgtttatgggaagatgtcagggagagaagagacagagaaagtcaataccagccctagcgtcaacacgaaaacaaccactgaatctaaagcactggatttgctccagcagcatgctaaccaataccgcagcaagtctcctgctcctgtggaaaaggctacagctgagcgggaacgggaggcagaaagggaaagggatcgccactcccccttcggccagcggcacctgcacacgcaccaccacacccacgttggcatgggttacccgctaatcccgggtcaatatgacccttttcaaggcttgacctctgctgcccttgttgcctctcagcaggtggctgcccaggcatctgcatctggaatgtttcctggacaaagaagagaataacaagattggacatgtacattgtcatgtgactggatcacatggggaagcgctttatacagacatcagttccatggtgttaatttgaaatgccttaatggcaggcaaaaaccagtcatttcatttttgtaaattacagattttatcacagagt

SEQ ID NO: 92 - protein, 354 aa, Homo sapiens
KLEFEPDSEDKISDCEEGLSNVECSEPSTSVSAYDQLKAPDGAGNPPGTPKGKRELMSNGPGSIIGAKAGKNSGKKKQNELNNLPVISNMTAALDSCSAADGSLAAEMPKLEAEGLIDKKNLGDKEKGKKATNCKTDKNLSKLKSARPIAPAPAPTPPQLIAIPTATFTTTTTGTIPGLPSLTTTVVQATPKSPPLKPIQPKPTIMGEPITVNPALVSLKDKKKKEKRKLKDKEGKETGSPKMDAKLGKLEDSKGASKDLPGHFLKDHLNKNEGLANGLSESQESRMASIKAEADKVYTFTDNAPSPSIGSASRLECSTLVNGQAPMGTSACVDPEWGREFSCKDKQPGLFRHI

SEQ ID NO: 93 - DNA, 26563 bp, Mus musculus
gcaggactggtgccctgggtgtgtgagtctttaacaaggaggaaggtctgacgcctgagtctgggaaacctctgcctcctgagggcttaatgacatcctgaaggaaccagagcaggttgtggtaactctgggagggaacgggaaggacataggctcaagaggggctttcaggtcaggacgtgctcacagtgtatgtccatttgcagcccagactcctgggtcagcatctgtcagtcccagggccactcagacctcccaggacctctgatgtccacatgaagaggggacactgtaagtgaaacctccttgcctggcacctggaaggtactgtgagaaatctagtagagcaggtgttgggttcagggtggaagctgagaaaactcatttcagagacaaagcttaaacatgaagctttattttctgagtgctcaggaatgggaatacaaaccagctgttgcattgaccaatcgtattttgacacaaggagttaagcaaggaagttgacattggtgattgggctgggcgtggtggcgcacgcctttaattccagcacttggaaggcagaggcaggtgaatttctgagtttgaggccagcctggtctacagagtgagttccaggacagccagggctacacagagaaactctgtctcaaaaaatcaaaacaaaacaaaacaaaatacacattggtgaccttattctggtcccgtggtttcaaggtcctaagtcagcttttgcagtcaggtcccctcttagatgctggcctggaattttagactaataagggaacaagagaggctgctcatagtcttttttttttttttttttttttagatttatttatttatttattttgtgtatgtgagtacaatgtagctgtacagatggttgtgagccttcatgtggttgttggaaattgaattttaggacctctgctcactctgatcaaccccactcactcagtccctgcttgctccggcccaaagatttatttattattatacataagtacactgtagttgacttcagactcaccagaagagggcatcagatctcattatgggtggttgtgagccaccatgtggttgctgggacttgaactcaagaccttcagaagagcagttagtactcttacccactgagccatctcgccagcccctgcacatagtcttaagtcaaggcaggcagcacatttatgacttgtgtgccttagttagataacgggataactgcatcttccctctttacatccttcactggttaacagacagacacaagaaaggcctgttctaggcctggggacagttctgaccctgccagcaagggggagtttcttcctgaggagctggactcaggaaactgtctccttacccaggcgttaggatcaagtgaggcctaggttcaaatcctagctctgacactctctagctgtgtgagcttgggccaactgcctgctttttccgtgtctcctggtttgttcctcggtgggacacaggtgataaaaagtttacccagttcgcagggctgtgtgaggatgaagtgagacagctgataacctagcgagcaggtattcagtaaatgtgagcttttaaagtactactgcttctgtgtgggtgggtgagtgcatgtgtgtgtgcactcgtgtgcatgtgtgaacacttgacgtctgtgttggtatgcttgcaagtgtatgtgtgtgtacttgtgagtgaggtacctgtgagtgtatgtgagtgtacctgtgaggtcagaggacagcctccagtcttgttcttaggcaccatcctttgtgtgtgtgtgtgtgcatgtgtgtatatatgtatttttgacaggctctctcactggcttggaacttactaagtagactggctgtctgataaaccccaggaatccacatgtttctgcttctccagtgttaatagtccaagcaggcactactactatgtgcttgttttgtgtgtgtgtgtgtgtgtgtgtgtgtgtgtgtgtgtgtgtgtgtgtttcttttaaacataggttttggagattgagctcagggcccagtgcttgcaaaacaatggctctgttgaccgagctatctccccagctggtattattgcttctggatgttagcttggtgtgaagggttcctgcctcttgcaaggcctcctaatagtttgtgctaatggtctgtcttaagaaaggtagagagggctaaggagatggctcggtggttaaaaacactcactgctcttccagaggtcctgagttcaattcccagcagccacatgatggctcacaaccatctgtaatgggatccaatgctctcttctggtgtgtctggtatgtctggtgtgtccggagtacagctacagtgtagtcacataaataaaataaataagtcttaaaaaagaaataaagagagaaagaaaggttggtaacataaacagacatggtgtctgaatccttgcctcccacgtgcccaggaagaagggatacagcttatactgaatggcagctgtgagcattaccttataggcagctgggcccatcgaaaacgtcagaggaggaaaacaaggggagcttggcaatgcagatttttgtccttatagaaatggaatctaagtgtacttacagtataatctgagtccagtgatgtcatcatcacagcagtggaattgtgggagagcctctcctacgctaggcactgtgctaagagcggcacaaaccttgcccgtagtcaccacaccgcaaccttagttaataggttttgtttgtttttactttataaattaggaaacttccggcacaggagtgtttaacttcggtaaaatgtacacagcccccaagtagaagagtgggattagaatatgggcaagctggctttagacagttaacgaggacattctgtgatgtgtgggtctgtgcatatggaggtcagaggtcagcattagacatttggatcacctactttctacctgacttttcgacgcaaggtctctcactgaacctggagctgcttgccagttcagccacactggctggccggtgagaccgagttcctcctgtctctgtcttgctagcatcatgatcacatgggtgtgccgtaacaccagttttcatttttaaaaactatttaatttttttctctcttttaagcgggttattgtctagtaaactcaggtcctcgtgttttatagagtgaaccatcttccctgactgacattcttctttacttttctgaaaccatgaagcccttactttatatcaaggtgctagctagagttcccttggggactgggggactagaggacagcctgtcaacctctcttttgggggagacttccatttgtcttgataatctccctctgtttttctgggattttacctttttctttgagagcgagagaaggggttgggtggggaaacaaatagaagaaaaacttggctgaccataggggatggtggcttccagacatcaaagtgggcagcagagccccggatggatgggctggaagcaggcctctgtccccttaggctttccttcggaaactggcagaggccctggcgggaacttctaagagccaagagaacaagtcttttcatgtggcctccctttgagctggcttctgggtggggttggggtcggtgggtagagggtggggagtgtgtggagaggtgaggccacagtcaggttgggaaaacagattgggcagcggctgtgagcacagggcctccattgtgcagctggctcttgctttcaataactggctctgaagaaggtttcattgaatgccagagaaaggagccattgaaatgcctggggctgggactccatgaagggttaaagacaggggctaagtcactgtggctctgttgctcctggcttaggtagatgtcccacacagggtccctatgcactgagaccaggactcagagagaaggatgcaaagatcaagctaatgggtacccccatgtaaagtagggaaacccccttttttccatgaaccacattgtccaagtaatatttaataagtaacaggcctccaagatgccctgtgggcctgccttccggggacagtgacctatgaacaggcctgtctcttcaggacttcttaagagtgctctccgggtgctccaccactctctcagtggcacagccagcatgacattgttaagccactttctaatgatcattaactattgtaattctcactgttcccccaaagagtgtgggtagactggtaagaacagctgtcactaaaacaggtgactgaggaaacctggaaactctctttggagggactttctccaaaaggactagctggttaggaggtcatggttgggctgtcagggggcaccagaagtggggtgcggtacccttatactcaggaccacatgctttgtttccagcaatggaggactgtgcggaccgagatatgtatacctatgaaattgaggtacctgtgtggatgctacaaagaacaggcagaaggtagtgacatgatctgctgctgagacgggcacacacaacgaacctccagtgccacagtggtgtggctccttggttgtcacagaactctgggaagactttactgtctccagaagtcaagtcggcaggaaggatgtcctgggcctgaaaggagctggcactctttactttagatcaaccattccggataaaaacattaaaaaaacagaaaggggctgaggaggtatcttggttggtaaagtccttgccacgtacatatgaaggtctgaattgaatcctcagaatccgtattaaaaatgtggacagggtggtatactggtgatttgctaggaggcagcgtcagcaggatccccgaggctcactggtcagccagcctagtgttttaaaaagacaaggctgatagtgttctgaggaaggatactctgacctttgaagacatggacacacagacacatagacacacacatatataccacatacacacagagacatacccaccacatacacacaaagacacagagagacacacacacacagacacacacagagagacactcacactcacacatacacatacacgtacacaccatacacacacatatacacaccacacatacaacacatacataaacacacacacacacacacacacacacacacacacacacacacacacagaggcatttcttgtcttataaacagtctctctagtaggttttaattaatccgtcacttcctgtgttctgggtggtgactaggtgaaggccttggatctgttctggagatatagctctttgctatagcaccacaggctctcagaattcacccgcctgattttgtttattcttgttatttctctctaatgcgtctctgtgtgcctacgttactataaaatgagcagtcgcctccagctacctttatatatgtcctctgagatgtgtctgatactcttggaatgggaataacatgatttccttgtaagaattgtgtctaaagtgagaggcagaaagcttagagtaaggaaggcttaagaggcccccttccgggctggtgagatggctcagtgggtaagagcacccgactgctctgagcacccgactgctcttccaaaggtcccgagttcaaatcccagcaaccacatggtggctcacaaccatccgtaacgagatctgactccctcttctgaagacagctacagtgtacttacacataataaataaataaatcttaaaaaaaaaaagaggcccccttcctacataaggggttgaactctgtgatatttctgacgatcagaggcctgctgtaaatcttgcaaatctctgatatagtccagcctagacaaatgcccttcagtgagatgtcagcacacatagtcagtatatagggtctttgccaaggactgtaaccagaaggatctatttagctatatataaaataagataaatttagttaaaagatgactaaatatacatatacatatatctactcacatgcacagatatatcaatggacagagtcacagaatagactcacccagtttttcactttaatatctctgcaccctaaaaagctgtctttgggacaaatgactagaataatgccacttttaagttggagaaacctttccaagtcttctcgtattgccttctcttttggttcaggaatctcacctctacacagctgggcatcttactcctttcttgcttagatctgggaatggggaactcacttttttttttttcctgagtctaacttcatgggtggaagtgaaatctgtgacagctaggaagtaacagagctacacccctgccatgtctgatctgcatgtcgtgggaagatgttaagtttcttgcagtgttttgatgtggatgtcttgtggggggtaagggataggaacacacgtatgcgaatgggaagcagatagtgagatgggggcatccgtgagagcatcatctaggaagcagctaggtctgaaggcagcgggatgctccacgtctggattgatttggccagagagtggccctgagcttgagataccttggtaggtattctgggtgtgtgtgtgtgtgtgtgtgtatgtgtgtgtgtgtgtatttgtgtgtgtgtgtatgtgtgtgtgtgtatgtgtgtgtgtctgtatttgtgtgtgtatgtgtgtgtgtgtgtgtgtgtgtatgtgtgtgtgtgtgtgtatgtgtgtgtgtgtgtgtgtgtgcgtgtgcgtgtgcgtgtgcgtgtgtgtgtgtgtgtgtgttgggagtgggggtgaggtggggagtgctgatgaactttgtcccaggaaagagggcaagtaccctgggaaagacacacaagcacaagaagataactggctcaatgtgtaagccacatgacctggatccacattacactgtttatttccaccctgtggtttcggagcctttggaaatgtctgctccaaatgttccagcccggcagctataatggtatttaagatggagtcctgggtctgcgtttatttccctagagcattggtggggacaatgacttctgaggtacgctaggtttctactctaggtttgggggttaccaaaagactgcattcaagtgttgggaaagaagggctgggctccaggagtgcgtctcctgcttctcttcccaggacattcatccactgttgactgtccttttgttaaggaagctgtcagagtgtttataaaagaaatcccttcaactggcctggaatctgcctcctagtgactctaacccacaagactcagttctcaaaagcagggagcagaacaatgggccatctgcagctgctgagtgctgactctgagcaggacacgtcacagagcgtgatagtgtctctcgtttgtgtgattatatcatttcacagatggagaaattgactgggagaacaataacacaacttgccaaggccagacccccaaataagtagcaggatttgaactcagacagtctgacgtcagagccttgtcctcaaaatactgtctgtgtacgacagcccccgtggggttgtgcagcctgggacccctatccttttaggcctctgggggaggggccagactaaaattgcagcctgttcaccttgccatctctcttggtgtatgaataaggggaaggtcacattggccaatagtctgggacaaacttaagagactgaaaagccctcatccttgtgacctctagtgactcaccttgtcacccaggacaaccttgctgtagcctccggaagcaccgttttagcaacggctccctggggaggctgtgcttttcctgtctgtcctcagcatcttttgccagaacaacaggctgctttcccttttgataagtctggtcaccctaaatatggggcttggagcaaacgggagcactggccccacgcagccctcatttccaaatgcagattcggactgtgctgctattctgatttccttccacacacagtggttttcagtaggagaggagggatcttggcaggagaaaggtgctaggagggaagacatacctgggagtttttgtttctaagacactggcctttaagactatggatccctcgcacagtggtctcacaacaaagggaagtttggcatcgctaatcccttttgttggctagcagtgtccacgctaaacatcgaagttctaagagcaaggtggctcggcaggtaaagccaaagcttacaggcctgggtttcactccctcaagctgtcttctgatctccacacacaggtcccggcagtctcaaccccacccatatacacacatagaaaactaactaactaagcaaataaatacagattaataaaaagattggaacttatgcagagccacatcagttcccgcccctccaaaccctcaactgcgcaaaggtcagtaccactgcttatgtccaaaaagacagcctgtggtcacttcaggctggatgctgacagggaaaatagaaggttgactgacagagagaaaaccccacttacagcattcctcagaaacctgtgaaatgggtttccatctgacaggaaaaaccacttccgcctcctggggcagtgaagaatgaggtattgggttctctattggcatatactacatgacatcgaagcccacactaaccgccaggctcctgttaacatatacctgtggtgcccatcaaggccactggctgttctgggccacaagcccccttcctggcttttcttgctattcttccactatgctaactcctgggctgctccatgctacaggtttctcttctgacccagcaggttccctttataacaagtatggcttctctcggccacactgatagccctggcagtcaccagtgtacctctccgcctcgaaccccaggtagccttgacggctttgggctccccccaaatgcctctggctattctttttctaccacctgtgagagaaccactcagcagttttatatttacaataaacccttctttacatccgtggagtcgtccagttcagtggcttcatgggtccctcgcacttactggtcaaagttgcccatgggcacttggtggctagatctagtcctcggctaggtttgctgtggcccacacagtgcttaaattagttagaaacacttaacaatgggaagagccgcccctgtatcaccataacgtttgacttgaatgtccctgtttatcttcttggaggggagttggcccaggtggttgcaggagcccattaacttactcatccattgcattcattcaagcaacagggttgagaacagacagtgttaagctcttcttaaccctggagggatcctgtggatataagatgtatacaacacttttgccatctagaccagccatgcactcttagcaccttataaccagctaagaagtggtgtgaggaaggtaagatgtggaaggaagagaagctggcagagtcaggaggaagctgccgttccagcagtccattggctctgtgatttagcagagctagttcctggtcatcccaggaccttggtctctccatctctagaaatgacccagttggctcggaaaatgaactggacttttctagggctggcattcatatactaagactccatgatctaggaatgcctggccgaactattccggaattgttccactgaattccaagcaatccccctcccttctctggagtccgggccaggagcaggccttagaactagcggccacagcgggtctgggctgcctgcccgggggcgggacctttttcgggcgtcccacccctccacctgggttctcagcccggcagatgttacaactttttctcccgctcttgggctgtgtcccttcccagacccgcccagcccgtgtctccctccccttccccctgtggggtcctgcccacctcccagcctggagcactgctttgcggggataccgggcggggtcagaagctcagctaggggaattgggggtcgggggagggaggagaaatggaaagcagaagcgagagaaattaagaggcgggagggatcggggtaaaagggaagcggagagtccggggatggtggagagcacttttgggaagcctccactccacgactcaggctggcccgtcagagctgggggagagggctgcgggaggaggctcggcgggagcctgaccttccgggagcgccctgctgcctgtccgagggtcctggaccagagccccgagggctctgactgcatccaggcgggcgggagagcaggcgttgcgcccctagcgcggcaggctctgaggtcctgggaaccccgctcgcccagaccggcgtcgcaatgcatgctctctcaggattctccctggtcagcctactcagcttgggctacctgtcctgggattgggctaagcccggccttgtggctgatgggcctgccgaggctggcgatcagccttcggtggctccaccgcagcctccacacattatcttcatcctcaccgacgaccaagggtaccacgacgtgggataccatggctcggatatcgagaccccaacgctggaccggctagcagctgagggcgtcaaactggagaattattacatccagcccatatgtacaccttcgaggagtcaactcctcaccggcaggtaggcatggcccattcccgagggactgggtgtccaaacccccagcacacccagttggtaggttgcaaaccccgcagaatagctctgtgcacggacctgagaaacacgtgttacgagccagctttgcctgcaacatctgttagctcatccataagtcccttgccctttttggacctctgtttccccaactctcatagttcaaggcttctgattatcttcgagaccttctctgtggtccacagttggttcctttgtttaatcagaagaatctttgactcttattttgaattctgtgcatattgacagatatggagtcagttcaaaagtcacttgactctcagtttcctggtccataaaaatggactgagggagagtttctatcctgaggaggaatagtgaaaggtggaggaattaggtgtaacttgccaggcattcaataaatgacagtctctgtctgtattactggagagatttgggtcctgtgccgttgatggcaccattgggagaagaccaaggaactggtaagatgcagagacctgtagcctgaggctggttgcttcccttttccaagtctccaagttttctcatctgaagaatccccccaaattgtgtgaagagaagggagggctggggattaccagagaaaagatgctgggaaaccaaagggggttgtggcaggcaaactccctttgcttaggagacaatccctgggttgggctgaagctaatcctctttggaaggaggccatcgcctgctttgggatcactagcgagatctcgggaccatgggccacctctctccgtttcctgggtgggacaatgaggcatggaattaaggagaggccagcttgatgtttctgcccaacttcaaagtcttgtgaaagagagggttatgaagtcagaccctggactggtggcttggagctcgaaaccaaactgtggtgtccttttctctttccacctgcattccgtctgccttttagatccagggatcgtgaagaagagcagggagagggagacaggtgggaggtttgtgttgcagaggtggctcagtagtggcagcagaccttggcatgggacagcgaagaggcaggacaatctgcatttcgagtttcccagttgatgtttctctccccaggtcgacgtgacattggttaactgccgagtggacagttagtgcagcactccaggctcttactggtgaagttagtggagcattacagagccagccgtgtctgccctccaccctcggcagctacctctgtctcacggatgctcgctccacggcttggtagcttggtggcatttgcttatgcagccagtcctgtttggtgtagctgggaagagccaaagtgtcttatgttactcactgacaaatggactttggcaaggcttagcgggcccacccacattacagaatcagtgtttcagaggcaccccacccttatgtggagacactcagctgggatactgggcccctaggatgcttctcctgtcacttccaatcatctctcagcttgccctgggtccaaaacagttctactgttggccagctgtctggctttgggtcccactgctacactttgggggcttcagtttcaatatttgtagaatggagttgatgataatgtttcatacgtattttacaagagaggtttaggttggtgaaatgtctcagcaggtacaagtacttccagtgtaggcctggttactgagctcagttcctggaacccactatggacagagctgactccagaaagcggccctctgactgactgtgtatgccttggcgtgagtaggcccaaactcatccactcgtaagacatgcgcgcgcacacacacattattaataatagctaataaataaataaataaataaataaataaataaataaaattaaaaaacaaaacaaaacaaaaaagaggcctggtagtgcaggcaggtctgtaatccctgtaaactatttaggaagctgatacagtgctggcttgggcttgcttgagttcgttcaggatgagcttggtcaacttgaagttctgtgtcaagataaaaagtaaaaaaaaaaatgctgggggcataatataactaggtggtagagtgcttctagagcatgctcaaggctggaagttcaaaacaaattcacacacactcacacatatacacacacactcacacacattcacacacacacacacactctcacacacactaacacacacacacacacacacacacacacacactcatggggtacagggagaattgaatgagctaatgcttaaatgtggctcgaagtcttaagaatggccttaagataaggaagcagtctggtgtcaaataccaggctaactcagctgcctaagggaaaggacaggtgtgaaattctaactcccctgtgacatcccaggtggctttacttgcaactcttaaagacatctcaaacagatcacgtgggtcatgcagatctcagcagcaaaagatgtggtacaaatatataaaggaagctcaggaactggcaaggcattgactgctgcataggcctggggggatggggcggagggcttgagggcttgagctcacagcaggtggggaatgtggggtgggggccgctggtctgataaagcccaggagcagggcacctctcagggatttcccgttccagccagctcactcacacctgcaaacgtcaaccagccccatatgggaggaggtgggcagtctacttttgaaaacactgctgcttggactgtttggtttcatgttcaagtctcagagctgcccttgactgctgagtgaccttgagcaaagcccctctgccctctgccctctgttgatgttttttttttttttctttttaaagtagatgaaaaaatctaaaagaggatttgggtcacttctggcttccaaaccctctgaattcattcattcgttcgtcgattcatttgttagtttgttcactctattagtaactgagggagctttaaataccactgaggtgtgaggaatacaaagacaatcccattctattatcaccgggctcaagaagacagttgtaatcctagggccaagtcgaccatgaaggtatgcaccaagtcgaccatgaaggtatgcaccaagtccctgctgcagggaagaggacccagaaacaatgtaactcactctctgggtgagctatgagagactatattggggtgggcttccaaggagtgggagtttgcctgggagacgagacttggtgtacccaggttctgtgctaagtttacagcttagagctcaaggactcactcaggtctggagcctgcctgtgctgggatgcagaacccactcttcctactagccatgtgagtcaccaccaagctcatacggttccttatttgggaggcaggaataataacatgcacttcctagtttgcagtgaggatttgagccaattcaaagggagcgtgatgccgaacatacagcaagagcttggtgttagctcttactgatgtcgtgcccaagcctgcctccactcttcatgcaccagcttcctggctatctggtcctgggcagtgaacgtaactgttctgagttattgcatctcatcaataagttggcatacatacctgccttggctgatgtgccggtttgagataaagtagtgtaggtgcttagacctttggtggtatctgttgctttcgttcctgttcaggctggtggcataggaccagcattcatctcagggtgcaactaggggttgctgattgggaacagtggtttggatgtagctcacctttgtttcccatatatcaatctctcacccacaggtaccagatccatacaggattgcagcactccattatccgcccacggcagcccaactgtctgcccctggaccaggtgacgctgccccagaagctacaggaggcaggctactccacccacatggtgggcaagtggcatctgggcttctaccggaaggagtgcttgcctacccgccggggcttcgacaccttcctgggttccctcacaggcaatgtggattactacacctacgacaactgtgatggcccaggggtttgtgggtttgacctgcacgagggtgagagcgtggcctgggggctcagcggccagtactccactatgctctacgctcagcgtgcaagccacatcctggccagccacaatccccagaatcccctctttctctatgtggccttccaggcagtacacacgcccctacagtcacctcgagaatacctataccgctaccgcacgatgggcaacgtagcacggcgcaagtacgcagccatggtgacctgcatggacgaggctgtgcgtaacatcacctgggccctcaagcgctatggtttctataacaacagtgtcattatcttctccagtgacaatggtggccagaccttctcagggggtagcaactggccccttcgaggacgcaagggtacttactgggaaggtggtgtgaggggcctgggttttgtccacagcccactgctcaagaaaaagagacggaccagtcgggccctggtccatatcacagactggtacccaacactggtgggtctggcaggcggtactacatcagcagctgatgggctggatggctatgatgtatggccagccattagtgagggccgggcctcaccacgcacagagatcctacacaacatcgaccccctctacaaccatgcccggcatggatccttggagggtggctttgggatctggaatacagcagtgcaggctgctatccgagttggggagtggaagctgctcactggagacccaggctatggtgactggattccacctcagacactggcctccttccctggcagctggtggaacctggagcggatggccagcatccgccaggctgtgtggctctttaacatcagtgctgacccttacgaacgagaggacctggctggccagcgacccgatgtagtccgcacccttctggctcgcctggctgattataaccgtactgccatccccgtgcgttacccagctgcgaaccctcgggcccatcctgactttaatgggggtgcttgggggccctgggccagtgaggaggaggaagaggaggaggaggaagaggaggaaggcagagctagaagtttctcccggggtcgccgcaagaagaaatgcaagatttgcaagcttcgatcttttttccgtaaactcaataccaggctgatgtcccaccggatctgatggcttagggtggcagggaatctcagttcccctcagacactctccctttgctggttctcagggaggaggcaaggtcaagtcttcatctgtaggcacgtggagggagggcacagaagccctcagctgaatagggtgggacttggggaagggcagcaaccaggctgggttgcctgggtcacaatcctgcctctttcctgatgagtttcctttttgccctcaggttacctatagcagcattctgcctcaatctcacccctaagatgagctctggtgactttaggactccagtgtacacatgtgtctggggccatggcagggtttcttgctgaccttgtcaccttccagacaacttgagtccatgaccctctttccagctctctgtggtgctcttggatatcagctggagtatggccagctggctgctgctctgttgaacaactcaatgagagaacggacagggtaggctctgagaaatctttacgttcctggagcctcatgacttgggagcctagtggaattcttctcttttggtccccaacatctggggggagggggaactggctgagcctgagccactgtatagtgagggtgggggaaacagctgtgaaaggagcctttgatttggtcttgaacacagttcttccccacagggccttgatttccctacttgcaaaggagtagggaaatatgagccttggctctgcctacctcacgttgctggtgctgtagaaaactggccaggctgatggttgtggaggagcctgtgaacttgattaaagtgccattatccagaggcaagagatgctggtctgtgtgtgtgtgagtgtgtgtgtgtgtgtgtgtgtgtgtgtgtgtgtgtgtcttggagacctgtgtgagctcgatgctagcagaggggacagaaggtaggtgggaaggaatgaaggaatgaaggaaggaaagaaggaaggttgaaaggaagaaaggaaggaaggaaggaaggaaggaaggaaggaaggaaggaaggaaggaaggaaggaaggtcctgccacaggcttaccatgtagctgcaggcaaacccctgaccctctctgggcctaagtgtttctctacacacaatggatgattcaagagtccttacttttggtggttacaggcacccctgtgcacatttgcatctggggtgggggggacacaggcttggtagtgttgaggaggggggtggttgtagagcctgctagctgcacactgcgttctgcatatctcccttcaggtcccagtcggcgcagtgtgtgtaggcgaaggccctgctgtgaattttgaaaatagttatttttgtcactggcaaaggaggccctgttaggactcgtcagcttgtggatgagcgggatgggtggagtggggtgggtgcggtgccgccgtggggggttaccgctgcttgcagggctgcatcgcccaggcagtgactgaatcctgcatgagggcctggcctaggctgtggggaggagatgaccactgcgtcctagatctttccttagccctgtgcttcctttcttccttttttccttaagatttatttctaatgatgcgtaggttgtgtatttgtgtgtgggtatgtgcacttgaataaaggacccacagaggctatagacatcagatcctcctagagctggggttacagagggcgtgagttgtccaacatgggcaccggaaaataaacttatgtgctctacacgaccgagctgtctctccaacaccagcccccttcttttgacttttctcatctccctcacttgtatgttttcccttcctcgataatgctgatacccagatggtaggcacggcccaggataggcaggggtctctgcgctccagtggctgtagtggttttcctgcctgctctgaagaagacactggctaaggtggtgtcttagcctactgtatcctagaggtgggttattcatagtctgcccactgcccaacacactctaggcctgctggggcctactctaactctgcttgctggcttgccaccctggcacacagtgtaggcttccctgtagagccaggctttagaaaactgtatgagtacttctctgagaactgctggaggggccctgcctgccaggacttttcaacttccagccctgtcatctatatcacttctgaggaccccgtgtgggggtcacgagaacaagaccatatgtagtgctttctgttctcccttgggtcccaggctctgaatcaatctggtcccaagatataagggatgattggtgctgaggctggtgtctgtttctgaagttttgaagacaagggttggctcaagcctccctgtgttcagtcctccactcaatgcagaactcagtgaactcagaattctcagcccagatgccagcatagcccagcatagcccagcatagcccaggagctactggagcatcagtttgaaaccaggtccgcaggaactagtgggcaacagtgtgtgaggccagtggtctttggggtattgtattgaattgagaggtcctgcttagcagtcagcatgcccacaacctgttctctacggtggtccggattcccctcagcaagcacacctgaatctttactacatcccagttcctggttggctcctgacttcgggttactatggctgtgatgaaacactacgactaaaagcaatgtggggaagaaagttaatttttttactcgaccttccatagacagggttcatcactaaaagcagagggcagaggaaaagatagctcagcggttaagagtgctgtctactcaacaaagaggtcttgagttcaattcccagcaaccacatggtggctcacaactgtctatcctgggatctgatgcccttttctggcatacaggtatacatacagatagaggactcatatacataaaataaataaataaatctttaaaagcaacaagggcagaaattcaagcagggcagggacccagaggccaaagctgacgcagaggccatggaggggtgttgcttactggcttgctcctcatggcttgctcagcctgttttcttatagaacccacaaccaccaggccagagatgggaccacccacaaagggcagagcctttccctatcaatcactaatgggaaaacatcctgcagtcggatcttatgaagacattttctcagctgagcttccctcctatcagataactctagcttgtgtcaaggtgacttaaaactagccagcacagcaccttatgctcacatcacctgggtccctttggagaggacatagttaaagggagcccagaggcagtccctaggccacaggtcttcattgcccctctctgggacggattagacaggctgcagacctgttagctggaagagttagattcaggcaagagcttgaatctttacctgatcctggctatggagtcctggcctctaatgatcagctccctaacaacccaatggagccatatacctgcctgggccatggctgtgtctcctcttctttcagacactcctggcttgcctaggacacaggctagcatcctgtcaatgccaggaaggggcacagcagggaaagagcaatgctgttggcctgactgccaccaactggtgtacctgttagagggcaacctctattctctgcaccttggttcctagctctaagggatatgtggcccctaaaggtcttcatagcttgatatgggaggcaggggggctaagaacagcgcaagagtggtgagcttgcacagacccggatttgatctctgggtgagtgaggaggaaatgagatgggggtgggggaagccctatttctagctgtcttagcataggaactgaacctccttctgcagggcctgtgtcactgcccctttcccccagggagggcccctgcacggggcacctcagggcacagccctttttccctccctcctctcttagacctggaattactcaacatcctgccctgactcagttgctctcccctcagaccctcacagtcttccttctcttctggcccacttttggctgagcctgcccccaactttttctgcccttagtgggacaggccccatggggaccattcagatggcacttttttccccccctggggtggttttctgtggtggtgccctattcaggcaactgcaagaccctgtggcatttagcatatgcatgagagcacatgaagaagctagctatccctgtgtgctgaggattgtaatcctctctcatccttcccttgtctcctggaacccagcccagcctcctgtccctcccgttgacacgagccaatgctggctcagcaaactccagggctcccacccctggccatcagcccttggcacacaggcttgtgcttgagtactgcacacgtgttgcagctggggtacacgtgctggactgttatgcctactgtggccccgggggtgtgtgggaagtctggcagaaccaatccctccatcccccgatgcaatcatcagcttattctctcacggccactcgggcatgcttgactccttgatgcccgccgccactaggcacagctgccagctttgtgggcacagaggatgtggcgaattagtggtcatgcctcctcagtggaatggcaattgcactcagcatgcaggtgtctaccaaaggcagtccctacatccccgatgtactctcgagacccatctaaggactagatctagtctctagaaggtcccatgcagatgtaagacagccctccacagggagattcttccagctagttctctattatcagatgggtctaagatcctaggacctgcctatcccttagccctgcattcagcgagagaaggggtaaagatgtgaggatgccagggaggaaggaaaagggcacaaggaagaaagaaagggaaggaagctggaagcatggaaggacaaagatggtgaccacagtagaattaggatcccatggttcctgtcagtggcaggcagctatcaggctgtctgtgcctccctgagcccctggggcatcttctaaatgctttgctggcctctgagccaagcactgcataccatcccgtggggagtgacaggccagcactggtcaacgaggatgatggctacttttgttcacagggtaacatctccatggttacagcctttgcacattcctcttagtactttaccaatctcaaagcagttgccaagcccttgggccctaataagtgagggtcccagtgccctctttttaaaattccttgccatttgttttgcagaatttactgcaaataaagccaaccccaggcaatgtctaaaccatgagttaaccccccagcaaggtctcagagaactgtgccccagagagctgccaaggttcagggaggagtatgaggagacaggatttctagttccttaataattccttctgtctcagccactgtgttcatcttgtttcagccacaaaactacctttattggtaaggaacattatttacccagtttcacacttgaagaggtccagagacgttaacacatcgattcaaaagcacagcctgtaagtcacatagccactgttagctgatcgacactatttcccctgggcaatggctgggtgattccagggatccccttgggaacaggctagagcactggctctcaacctgtgcgggtcgtgacctccttgaggggtaggggtgagggcagtgtcaaacaacccttttacaggagtcgtttaagaccgttggaaaaaaaaccagatatttgcattatttttcgtaacagaagcaagattatagttatggagtagtgacaaaaattatgttacagttggaggtcagcacagcatgaggaactgtatttaagggttgcggcattaggaaggttgagaatcactggcctagcggatctgaatcaggaacacggacgtacagctctgcgccactcctgccttcctctggtgcctctagccttgcccatggtgttctgggcctgcctgctacccaccagctgtgcggccctgtgagcacaggcctttctgctccgctctgaattgccacgttggcggcagaagcgggaagcgtattgtgcgcagaaacaaaacggagtggttttttttttcctttttctgaaggtggtaatggtgcaattagtggcgaagccatcaccccctcctccccggctcgcctccctccttcctctccacctcccttctctttctttcctgagaaaaaaagtggctgagttgaaaagatctcccgtcaatctttctgtaacggactcaggaagagggatagagggccccctaatgtttccagggtcctcgagcctcagttgggtcaggcacttgttggtgctggagaatattcaaaggtaccactatgttccccacaagggagttgagcaatggattctgaggagcaagtttgaaacagagaatttgcgttcccaggtcttgtgatctgccccttgttcactgggggacaaatgctggcatgagaccctgagacctctgctcagccacctttctctctctctctctctctctctctctctctctctctctctctctctctctctctctctgtccttaatggaggtgtgtgtgtgttcaagaccaagctgcagtgttggagtgcttgtgggctcattttaaaacttccatgttttgccttctagaaactgaaacataagaaccccattatggccttaggtcacttcatctccatggggttcttcttctgattttctagaaaatgagatgggggtgcagagagcttcctcagtgacctgcccagggtcacatcagaaatgtcagagctagaacttgaactcagattactaatcttaaattccatgccttgggggcatgcaagtacgatatacagaaggagtgaactcattagggcagatgaccaatgagtttaggaaagaagagtccagggcagggtacatctacaccacccgcccagccctgggtgagtccagccacgttcacctcattatagttgcctctctccagtcctaccttgacgggaagcacaagcagaaactgggacaggagccccaggagaccaaatcttcatggtccctctgggaggatgggtggggagagctgtggcagaggcctcaggaggggccctgctgctcagtggtgacagataggggtgagaaagcagacagagtcattccgtcagcattctgggtctgtttggtacttcttctcacgctaaggtggcggtgtgatatgcacaatggctaaaaagcagggagagctggaaagaaacaaggacagagacagaggccaagtcaaccagaccaattcccagaggaagcaaagaaaccattacagagactacaagggggaagggaaggagagatgaattagcttcccctgtaaaccttagaacccagctgttgccagggcaacggggcaatacctgtctcttcagaggagatgaagttgccagggtaactacatcctgtctttctcaaggaccatcccagaatgtggcacccactagccgttaccatagcaactgcctctttgccccacttaatcccatcccgtctgttaaaagggccctatagttggaggtgggggaggtaggaagagcgatgatcacttgtggactaagtttgttcgcatccccttctccaaccccctcagtacatcaccctgggggaacagggtccacttgctcctgggcccacacagtcctgcagtattgtgtatataaggccagggcaaagaggagcaggttttaaagtgaaaggcaggcaggtgttggggaggcagttaccggggcaacgggaacagggcgtttcggaggtggttgccatggggacctggatgctgacgaaggctcgcgaggctgtgagcagccacagtgccctgctcagaagccccaagctcgtcagtcaagccggttctccgtttgcactcaggagcacgggcaggcgagtggcccctagttctgggggcagcgcttcagcatcccagccctagttcccagcctaaagcctcgcctgcctgcccagtgccaggatggctaccatcacctgcacccgattcacagaagagtaccagctctttgaggaactgggaaagtgagtcacacctcagggagtcctagagagcatggggatcagtctccttgggcagggggagggggcgtgtgcctatgtggccagagctgtcccgtgcatgcagagggaggtgtgcagcatgatttggaagcactgtgtatgcatagggtgtccagagttaggcgctgacacatttatgagtccagtcagcctggtgtgtgtgtgtgtgtgtgtgtgtgtgatggaaaggaaacagattggtggtgtatgcacacacctatgcatataaatacacatgacctgggttcacaaagatatctagaaacttggggtttgaaagggattttcccacttggctggatctgagctggaatctatttttgtagttgtacttagaaacctccaatgacaaagaaagtttgccaccccctgacctggagatcttgtctttagacactgtgcagagtggctagctttctcctagcacatcccctccggcttccccagataccttccgggagcaacagcttcagtacagaaggagttaatataaagcaatcacagtgttgggaggaggggaaggacagtcagccagccggggggtgccactgtggcactgactatacaaaacaactgtggtcctttggcaaagttgcccatcgtgttatatctcaggaggctgagaggagaaaggttccctccagaagagcagcaggctacagatataagagaaggtttctagatgttcccagctaggttatggggtcctgggttggatcaggagttgggggagcagtttggcagagtgccccacggatgcatacgtgctcctaccagtcctgtttggttcctgctgtagcgcagtaacatgagacaaggggccctgtgagcagatgtgtcagtgtgagctcctgcaggtacacagatattgaggagagactatatatgaaatctgtgtgtgtgggggggaacaaatggagttgtgtaagaactgacactgggcacactgcaaactgaaagggcaaacactggtgcaagtaaaacaagaagagatgtgtgtgtcatttgcatggcaagcccgcccccctccaaaaaatgttcatgcgccctgcaagggtgcatgtgtgcaattatgcaagggttgttcttggctaggtgatgttgcagcaagggtatggacatgcatctgtgtgcacatgtgtggcaggtcagagatggatactctcagtgaatgtgtgtgtgtgtgtgtgtgtgtgtgtgtgtgtgtgtgtgtgtgcgtgcgcgcgcgcgcatgtgtaaggtcacagatgtgaaatgtgaacagaatgttcttgagtgtgcatgtatcttggggactatgtaaaggaagctgtgtgtgtgtgtgtgtgtgtgtgtgtgtgtgcgcgcgcgcgcatgtgtaaggtcacagatgtgaaatgtgaacagaatgttcttgagtgtgcatgtatcttggggactatgtaaaggaagctgtgtgtgtgtgtgtgtgtgtgtgtgtgtgtgtgtggcctaggctcatgggctcatgtgggtgtgtgggtgttgtaggcatgtgtgagcttatgctggtgtctgcatatgtgtgggaggtggacctatggctgtgtataagcacagcccctgaacacacttacacacagagagagagagagagacagagacagagacagagagacagagagagagacagatggagagacagagagggatagagagacagagacagctcccttgtgcaaatgtgtattcatatttgtctacagactttctgctgttctgcgtgtctttgcgttggaggcaggggtaggggcaggaatgtagtttttagggtggctcaggagaactgtcttttaaagtttatctgggacccctttccagagcatgtctagtgttcccttggaacctaaggatttcttgaatagtcaggagctgcctttcaggggccactgaggctggttcaggcaagactgcgtcacagagcgcagtggaaggaattaagatgggacttcagggatcacagtgacagtaaactgctcttttgccctgagaagaaatggggatcattagaactaggctctgtgggctgactttgccttctcagccccccccccccgccttcttggatactcagaggtgtcagagaaggggcagaggaaaactgagggtggcagggacgcctgggtcttgttcaatcaattacagatctcctccttccagaactattggtgcttttaacctttttttaggtcacttattcctccaggattcagatgaaagtctaaatagatattccctagaaaaacgtataagcctacaaaatgttgcttgcagtgtcagagcttgtgggacctcaggaaacagtgcaccaacctgtgcttgaagatgcttgggtgaaggagaaggggctgtggtgggccggcttctgtctggtgtgtccgtgtgacacaggccagggtaccctatgaaggatgagccctgtggcttttgctctgcaccttagccttggcctgagcatctggtggggtagggaggggctgccctacatgacccttagctctgtgacactgggcaggctgccactctttctgacctgcaagctggagatttagaagactgggaggagtatgtagatggcatgtgaagacacagcctcaagcctgacacgcagtaggcatttggcaggacgttgctgctggggtggctgttgtcctcaaggattgggccagccttt

SEQ ID NO: 94 - DNA, 2213 bp, Mus musculus
gcacttttgggaagcctccactccacgactcaggctggcccgtcagagctgggggagagggctgcgggaggaggctcggcgggagcctgaccttccgggagcgccctgctgcctgtccgagggtcctggaccagagccccgagggctctgactgcatccaggcgggcgggagagcaggcgttgcgcccctagcgcggcaggctctgaggtcctgggaaccccgctcgcccagaccggcgtcgcaatgcatgctctctcaggattctccctggtcagcctactcagcttgggctacctgtcctgggattgggctaagcccggccttgtggctgatgggcctgccgaggctggcgatcagccttcggtggctccaccgcagcctccacacattatcttcatcctcaccgacgaccaagggtaccacgacgtgggataccatggctcggatatcgagaccccaacgctggaccggctagcagctgagggcgtcaaactggagaattattacatccagcccatatgtacaccttcgaggagtcaactcctcaccggcaggtaccagatccatacaggattgcagcactccattatccgcccacggcagcccaactgtctgcccctggaccaggtgacgctgccccagaagctacaggaggcaggctactccacccacatggtgggcaagtggcatctgggcttctaccggaaggagtgcttgcctacccgccggggcttcgacaccttcctgggttccctcacaggcaatgtggattactacacctacgacaactgtgatggcccaggggtttgtgggtttgacctgcacgagggtgagagcgtggcctgggggctcagcggccagtactccactatgctctacgctcagcgtgcaagccacatcctggccagccacaatccccagaatcccctctttctctatgtggccttccaggcagtacacacgcccctacagtcacctcgagaatacctataccgctaccgcacgatgggcaacgtagcacggcgcaagtacgcagccatggtgacctgcatggacgaggctgtgcgtaacatcacctgggccctcaagcgctatggtttctataacaacagtgtcattatcttctccagtgacaatggtggccagaccttctcagggggtagcaactggccccttcgaggacgcaagggtacttactgggaaggtggtgtgaggggcctgggttttgtccacagcccactgctcaagaaaaagagacggaccagtcgggccctggtccatatcacagactggtacccaacactggtgggtctggcaggcggtactacatcagcagctgatgggctggatggctatgatgtatggccagccattagtgagggccgggcctcaccacgcacagagatcctacacaacatcgaccccctctacaaccatgcccggcatggatccttggagggtggctttgggatctggaatacagcagtgcaggctgctatccgagttggggagtggaagctgctcactggagacccaggctatggtgactggattccacctcagacactggcctccttccctggcagctggtggaacctggagcggatggccagcatccgccaggctgtgtggctctttaacatcagtgctgacccttacgaacgagaggacctggctggccagcgacccgatgtagtccgcacccttctggctcgcctggctgattataaccgtactgccatccccgtgcgttacccagctgcgaaccctcgggcccatcctgactttaatggggctctctgtggtgctcttggatatcagctggagtatggccagctggctgctgctctgttgaacaactcaatgagagaacggacagggtaggctctgagaaatctttacgttcctggagcctcatgacttgggagcctagtggaattcttctcttttggtccccaacatctggggggagggggaactggctgagcctgagccactgtatagtgagggtgggggaaacagctgtgaaaggagcctttgatttggtcttgaacacagttcttccccacagggccttgatttccctacttgcaaaggagtagggaaatatgagccttggctctgcctacctcacgttgctggtgctgtagaaaactggccaggctgatggttgtggaggagcctgtgaacttgattaaagtgccattatcca

SEQ ID NO: 95 - protein, 575 aa, Mus musculus
LHPGGRESRRCAPSAAGSEVLGTPLAQTGVAMHALSGFSLVSLLSLGYLSWDWAKPGLVADGPAEAGDQPSVAPPQPPHIIFILTDDQGYHDVGYHGSDIETPTLDRLAAEGVKLENYYIQPICTPSRSQLLTGRYQIHTGLQHSIIRPRQPNCLPLDQVTLPQKLQEAGYSTHMVGKWHLGFYRKECLPTRRGFDTFLGSLTGNVDYYTYDNCDGPGVCGFDLHEGESVAWGLSGQYSTMLYAQRASHILASHNPQNPLFLYVAFQAVHTPLQSPREYLYRYRTMGNVARRKYAAMVTCMDEAVRNITWALKRYGFYNNSVIIFSSDNGGQTFSGGSNWPLRGRKGTYWEGGVRGLGFVHSPLLKKKRRTSRALVHITDWYPTLVGLAGGTTSAADGLDGYDVWPAISEGRDRTEILHNIDPLYNHARHGSLEGGFGIWNTAVQAAIRVGEWKLLTGDPGYGDWIPPQTLASFPGSWWNLERMASIRQAVWLFNISADPYEREDLAGQRPDVVRTLLARLADYNRTAIPVRYPAANPRAHPDFNGALCGALGYQLEYGQLAAALLNNSMRERTG

SEQ ID NO: 96 - DNA, 25901 bp, Homo sapiens
  misc_feature (1)...(25901): n = A,T,C or G
gacaccctcaaatgagaccttggagccatgctgctcgcaggaaactatcccctgcctgaagtcctggatccaggggacgagggctcagcctccaggtccaactgccagcgttggtctggaagcttcctgctgagcagaaactcactaatccctaaaccagctcttcctgccagtgaccagccaattaccactgcctgcctcagctccagcccagcttcattcaggaccgaggcactcttaatcatgtgaaggacacatattttggggtgttctcctctctgagcctcagtgtcttcacaagtctaagggaatgacaatggaccatcaactccaagagggccaggtggtttgtcttgtccatatctgtagtcttagtcccagtgagtgaaaggcacataatagttgctcagtaagtgcttgttgagcaaatgaattggataaagagatccttgatttctgtgtggataagacagcattctcgcagtagttggtactcatccagtagcaagtgacagatgtcaacacaaattggtgtaagaaagaaggaacgtattgttcccataactgaagtccaggggagtagttctagcttcaggtaggactggaaaggacccatgtactcaaatggtgttattgggaatctgtctttacctctcactttgctttttttctcttcactacagttagctccaggcaggtccaggcttctaatcttcttgctccaagtctagcagcaaagagacaatgaacaatcttgttctcaaaaatccaaacaaaattctcagaattgagtctcactagacagtcttaggtcacttgtgcattcctgaactaatcactttgaccagggacatttgatgctctaattgtccaagcctgctcctggagtcaacccatcagtggaaacccatcaaagaaaatctaggttctgtttccaagaaaggggagcagctgcaaggcagacaataggtgcccatcacagtatttgactaaagtctgaacacctaggcaactcttaccttctctaagcttcagtctcttcatatgtcattgataacaatgatgacactaacaaaattcctgccccttttacatcccagagctttcgtgaggtccaaacaagatcatgagttatgataataattaacatttattgaaggatcactggacatccggccctgtgctaagtaaaccctttacacatttagttttatcgttaccacaatccacgttactgatgagaagcaggttgagagaggctacaaggcttgtatactggtcacacagctaggaagggtggagctggggtttaaagcagtaccctcaagcatgaagctatatataaactgtaaataattttacaagtgtaagggattattagtaacggcctgtactattaataatagaaaatatttaaaaccctgaaaggaaattcaaataaattcaaacaaatgtttgtttagcacctactatgggctgatcactcaccaggggctcagaaagagacacataaataactctgaaacaggcagactgtgatctaatagaaccataaacatgccccaggggactgtggagagcaagagattgactgaatagggaaggaagggaggaggaggtctagaaaagtctcttggaagcggtgggatttgagctgggctttaaagattaaaggacttcaacaaaggaagggaaagggaaaatcaacttttaagagacctgaaaggatctaaagactcagaacagagttcttggataagggttcagcacttctatgcaaaataactttagcaccagcagggacttcaaaagtgattgacttagcagagcacagtagttgccatgggaacagaggcaagcctcatccctgtcattagagagcatctctggctttgagcagtctagccaaggccaggaggcagcgggggctgggttgtgctatcccttagaagaaaaacccagcaagattgctgccccgagagactgactctcatttcacagggaggcagagctgacaggtgacatctgggtctgagaacatagaaagccagaggaagcctctgcctcaaggggctttgggacatcctgaagctattggagcaggcaagggagcctcaaggagggaatgggaagggcaggggacaagcctgagagcggcttccaagatggatcaattcccactcagtctgggaggagcagagcagtgctggaggcagctccacccagcatcccagcgtggcagggggtggagggcgtctcccagagcatgcactcatgtcactcctaggcccactcagacctctcaggcctctggggcccactgccagggcattccagtgcattgggagcgttggcatctaaccactcaagtgcagaggggaccccattcacaggcttggtgacaggagagcatatggtggggactttaatgcagcaggcaataggtttgacacctatattcaaatcatggccttgacactttctagctgtgtgactttgggcaagttactcaccctttctgtgtttctcggtttctccatgggcaagatgcagataatgataataattttacctaccttataggtaggtaagaatttagtgagataatagatataaagagttacgcatggtacctggcacagtagatcgtcaataaatgtaagctattatattattattatcacttccgaatttcaatttggtatcgagtcaggtttttttaatttatttatttttatttcaggcagtgtctcttatcatttgtgctaaaagccagtttctccaagtatagtagatgatgacaatgacagcagtaatagtagtgacgggacccatttaccttccatatatccagtgacattatcatgaagaaggaaggcaaagttctagtgctgaatgccaggctaaacgctcgagctttttatttcaggcagctagtggctattgaaattttggaggagaataacttgatcaggggaatgtagatttttgccctgaggctatacacttgtagaaatagaatctaagtataacaacaacaaagcttagtaacaaaaacaataatagctaccattttcagagagctaattgtataccaggcactgtgctaagagcttcagaagccttgtctgttgtaatcctcacaacaatcttatgaggttatatatttctccttctccttctcctcctcctcctcctcctcctcttcttcttcttcttcctctcacccccattttacaagtaagaaaactgggcacagagaggttaagtcatgcagctagcaaatggcagagctgggctagaacacaggcgatctagttctaggagtctcacatttaaccagaacacgctttttccttccctgagccttggaaggccctcgtggtggggttggggggcagcctgccaccctcacttttgggagcccctctgtttgtctgcatctgagcactgccactctctatttgattctctgggacttcacctctttctttgaaagtatgtgtgtgtttgtgtgtatgtgtgtgtggggggtgtttgtataagagagaaactgcagctgaccagtgatgacagaagcctctggacatcaaagtgggcagagccctggatggatgggctggaggcaggcctgggtcccattaggctaattcctctcaaggttggaagaggccagggcgggaacttctgagaacatggagaacaagtcctttcatacgacctccctttgagcaggccttggggtgggaccggggtcgggtgggtggagggtggggagtgtgtggagaggtgaggccacagtcaggctgggcaaacagattgggcagcggctgtgagcacagagcgcccattgtgtacccagagctctgctttcaataatcttctcggaagaatgtttcattgagcgccagagaaaggagccattgaaatgccagggctgggccctatgaagggttaaagacaaggaggccatgggtacctgggctcttgcctatcctggctcaaagacctgatatagggatcctgatcactaagacaagggcactcagtgagaccacccagaggtctggaagcgagggtcagagggggagatgtatgtctgccccagaaaggctaaagtaggtgccccagtatcaaggaggaaaacccctgtcttcccagcaccattttgcccaagtaatatccaagaagatgttagataccttctcagataccccttcagcctgccttctgtggagagcaacccatcgggcagacgtgtctctgcgtggacttcctgcgtggacctcctgcgtggacccataccacgggtcctgcaatccattctccacaatgcagccgtatggcttccttaaacacctgtggcctttccattaatcagtaattaattataatgaatgatgctgaagcagagagtgtgggagttacggtaagagccagtggtcactaaactaggtgaccaagggaacatgtagagttttctcttccaaatagaaagacctgctcattagagggatatggcctggctgtcagagagggcaccagagtgggattctctgcttccacactgagtcccgcgtgtctttgccagctactgaagcttgtggggcttgaagtgtgggtaacaccatgctggcctcagtgggctgcacagaggaggcagaaggtggatgagaggggcctgccactggggagggagagcactcttgttgggcagctgagaatgacctccggcaccaccatggaacccgctgaagatgttgctgcctcactgagcctgtgtctgcagagaggatgttctgcaactgaagctgaccttgcactatgaaccgttcatattaaccattttggatggaaaccttaaaaaacagatgatgcctttctggctttcttaaaaagagatcctcaactcttaaaaagagatctaaactcacttctgtgcggaacggtgatttggcgatgtttctgggtctgttcaggtgaatatagttcttggctcctgcaccgataaaccccaaactcccaggcttttggaattcatcagtttgaatttttgtttattcttttgtttctccttaatttttcactgtgaaacatgtaagcatattttactataaaataggcaagtgtctcactttcttatatattccatctgagctgcttctaatattctcggactgggaaaggaaatgattggccttataagaattgtgaatgaagtaagagtcagtagacttaagagttaggaaggcctgaggagctctcctctgagttaagtgattgaactctgtgatattttgagtgttcagaggccttctatgttttcttttggtctttgatttgatcctgcctagacaaattgacccctagagagaggacgacagcatgcataatttatgcataaggtctttgccaagggcaataaatcagaaggaaataatattggtacttagataattttagttcaaagatggccaaacatacacatatacctagccactaacatgcacacacacacacacacacacatacacacgaatagcaatgacagacaaagccacaaaaccaactaacccagtttttcacttttatatctccgctccctaaaaagttgtctgggaacaaatgattaaaatcttaacattttcaaatgggaaagagctttcacagtcctttcattttgcttccctctttttagttcaggaatctcttctattatctcctggatagacaggcactttaacccccttcttgcatggatccagtaatgggaagctcagtactttctgaagtctgatttcatcaatggaaatctgtgacaggaagtaacaaaactacaccctgccacatctgaaatgcattttgtatgcagatattaggctttctgtagtgttgtaatgtggatgtcgtttgggggttaagggaggagatcacatctgtgagaatggggggacagatctttcctgtgtggggtggacattcctcttgtcaattgtcttggaaacagctgagttctgagacagaaactgaaaaggctagtttagcttgctggagagggaatgtctgtgtctctaagtcttaattcttgggcctgaacttgagacatgttggagttttgagagtctgtgtaggttggggtagggctgatggacattgtcccagggaagacggcaggtaagcaccttgtcttgtagagaacacaaagggaagataagtgagccaatcttgaaagctatatgaccacgattcacattacactttgtgtttattccctccttgtcatccttgagcctttggaaatgtctggtttaaatgttgcagcctggcctagctgtgtaatggcatcactggaattgctgagggtcagtgtttatttccttagaatgatagagggaggatagtgctctctgaggcctctgtggattttggtgattatggagactcttaagaaaaaagtgagtattggggaacaagagttgggccctaagtccacccactcccctccacatggtgattcaccaatcactgtcatccttttattaagcaggtggccggatttcttacaaaagcaatcccttaaattggtccgaaatctgttttcctgtaactttcacccacaggacttagtccttcctctcaaaagcacagagaacaatcatcgtaaccattcacattcaccaagtgcttactgtgtgctgggcactttactgagcattgtagtagatcttatatatactattatcccattttacagatgaagaaattgaggctaagggaggtgaaataacttgtgcaaggccagaccccaaatgagtggcaggatttgaactcaaatagtctgatagcagagcccactgtcttgaattctgaaatactacttgtctcagtgacagccccacagaggtctgccgcctgtgacctttcctccctgggccttttttgatccaggtggaacccccaccccatccccttgctgcttctctttgtgcttggagtagaagggaggcagccctgcccagttccttttgccctggggcaatagaaagaatgcaaaaccctagtccacctgacctctggtgacttgttccacttcgaccccccaggacagacagccttgtggaagcctctggaagcaccattttagcagccttcccctcaggaggctgtatttttcctgtctgtcctcaacatgtcttctgccagaacaacaagctcagttttcccttctgataaatctggtcaccctaaatatggggctttgagcaaatgggagcggctggccccacgcagccctcatttcaaaatgcagattcacacgggctgctattttggaggtctggtttctttccccacacgcagtggttttaagtaagagggaagggatcatgacagaatcttggcaggggaaagatgctaggagagaagatgcacctgggcagtctttgcttcccaaagtccccaaacactggcccttcaagaagctggttggggggtggggggagcaggaaagagggtccatggtaacataacactgggaaatacagcctaaccagcccctcctgcagatcagcagtgtgcatgttaaacatttgaaatcctagaagtaaagaagcctaactggttttgtttagcccagtttttccatttaaaaatgtagcctagtaaaattttgcaaaacaatgatgcagagcagagcttgcaaaccggcaccgatggtctgatatattcctgggagaggtctgatttggcctacaaagtgcttaaattttgctttcaattagtcactaacatttcacaattggaatagttctcctaatagataaagagggtattcctcttgaaaaatcagaagatctggaaacactggtccgtattcttgcctgactgtagtcagctggaagccaggctgtggtttttaacttgctgcagcccctgtgtctccttagggcaagacaactatctcttgctctactcatttatgatgctcatcgggttccagagtcccccaagcttgccttctctggtgtggaggtttccttgggtaggctggcctaggtgaccattggggcccattcatccattcactcatgcaacatatactgattgagcttatactgtgtgctgcaccctgtggatacgagatggataaaacagcccctgccctctggattccagcgctggcattctaagattctagttgggaactgcagaacgaggaggagggaggggttgaggagaggggagctggcaaggctacaaccaagcttcctgacttgcagccgcgggggcttgccaaagtgcttgccattctccatcgctttctctaccggctcaccgaagggagccgccactccaacagccacggtgagccttagagacatagccactgacttgttctgtgacttagacgcgttgaggctcatctccgggcctcagtttctccatctgtagaatgacccggttggactaggaaatgatgggctttccttccagggctggcactcagagaggctaagactccatgatcgaggaatgtctgacccagccattctggagctgttccatcgaattccaagcagccccactccctcctttccccatcccggtcaggggcgggcgctggagccagcaggccgagagggccggggcttcccgcccgggaggtggagccgctgctctgcgtcccgcccctccacctggggctcggcccggcccggcagatgttacaactttttcgaattctctcccgccgtgtcccctcgacccgcccaacttgtgcctccctccccttcccctctggggtcctgcccacctccctgcagggagctgggctgttttaaggactccgggtggggcgagaggccgggaaagcagaggagagagaaattaggaggcgggagaaatccagggcaagaaggaagaggggagtcagaggatggtagagagcactttttggaagctgccacgccgcgtctcaggctggccgggctgagccggggaagagggagcaaaggcggcgcagggcctgcgcttaggcagcgggaggcagctcggcgcgggcctgacctccccagagcgccccgctgcggccgagcagatccggcccagccgtccggcagccagtcccggaccagacactggaccgtccccggggggcgctgaactccctcgcagcatccgagccggcgggccggtggtgcgccctgggcgcgcgaggtggtgaggccccaggagcccggcgcgccgggacgcgcgggccggcttggcgatgcacaccctcactggcttctccctggtcagcctgctcagcttcggctacctgtcctgggactgggccaagccgagcttcgtggccgacgccccgggaggnnnnnnnnnnnnnnnnnnnnaagaaagaagagatcaagaatatgaggtataaaagaagattaggaattgagataaatgattaagatagagataaaaaaggaaagattcataggagtgtaaagtacggggaaaagaaggaagaatgaatgaagcaagtaataaaaactaagagagaaggattaaaaacaaatgaaatcgaagttagtaaaaaaaacagaggataagtagggaataaaaattattaagaaccaaatatagtaccaaggaaggaacaaaaaagatggatagccttaagcaagaaaataaaaatgatagagccaaaaagaaagaccaatttaaaaagggcagaattgggaacaaggtccaaacaatcaaaaagaataagaggtgtaaaccttcaagtgctggaagaaagaagccaggaatgtatactgacagcattaataaggacacaaaggtaaaacgatataaataacagtaaagcaagcagtgaaaaactgattcccatacaaatctcatggaaggatggaagagtgatgcaagagagatcctgaataagttcagtgcatgtgtataatcaagacctatataacagattgttaatgtatagtgttcaacagatgaataaaagcctccccacatcatcttcatcctcacggacgaccaaggctaccacgacgtgggctaccatggttcagatatcgagacccctacgctggacaggctggcggccaagggggtcaagttggagaattattacatccagcccatctgcacgccttcgcggagccagctcctcactggcaggtaggcgtggctcaaggccccggggctgggcatctaaaccccaaatcaacccagttgatagatttctcctgccagtaccaccccatgctgggatctgggaaatctcctgttggctgtgtaatcattagtaagtccctcgccctctctaggcctcaattacccttcctttacactgaatgggcttcatcatctttgaggtcttcttgctttgatgttccaggacactcacattccacacaacgtggagacatctggtcatccctttgttagaggaacatggcagcctctgacatttactgctgcttctatttatggaccccgagaccctgagcaagtcatttaatttctctaagcctcagttttcttgtccataaaatggagcaaagaacagttttcatcttgaaaaggagtggcaaagttggaatgagttgtgtgtaacctgcttggctgtcaatatatggcagcctctatgtctcctgagggattcaggtccccatactgcttgatgaatacattgggagaagaccaaggaattgataggtggaagagaaagacacataggataccatgacctgtgtagccttagggtggttacttcatttctctgagcctctgttttttcatctgcaaaatcctcccaagttggctgggagccccaagtagacatgctgcttcctccacaaggaaatgtccacaggcgaggcagcaggattacaggattaaaagagcagggaaacaggaggtgggggtatggaaggcaaactctggccacttaggagaaaatcctttggcagtgctgaagctaattctccttggatggggtccaaggcatgctttctcccaagttccacccaagagccactaatgtgatctcaggaaccagaagccttagtctccctgtttcttagtctcactatttcttggatgggagaaattgaggcaaggactcagggagggcctagtttggtgcccgtgcccaacttcagggtctgtgggagataggattgagaggccaggtgtttggcgggggtcccggagctgggcatcaaatggcgtcctttgttccttcgatctggcacccagcgtttagatccaggaatcagaaggagaacagaagaaagaaggaggggtgtggggtgtgtatgggttggggtggtggtgcaggttagtggtgtagtggtgaagaccaatgttgacctgcagaagagggtggaggagtctgcattcccaagagttatacacaacttagcgtttctgtcctaagaggtgacttttggtttaagtagcggaatgagcagacagcaggagggcagtgctccagtcccctgatctgcgaagctaactgaaggtggccggccagtgcctgccctcccccaccctgcagctggctccatctcattgatgcttacagccctcgttagtgtttgttaacacatccagttgtgttttgtgacactggagagaggcaaagtttctcttgtgactcacttgcaggtgggctttggtgactcttagctggcccatccgctttacaagccagcgctccacagcaccccacctctatgaagaccggcccagttgggactcagggccctagggtgcttctcatatcaaatccaataatttattagcttgattgaggcctggagaggccgttatcaccaaaagattttgagcatgacttgagtggacccaggttcaaagcttagctccactgcttgtcagctctctgaacttgggtcattgctgcactttcgggggacttggttttatcatctgtagaatgggggtggtaatagacttccctgtaggtttttaaaatgagagttaaatgagataatgtatgtgtatggcacatagtgttaaaaatggcagtagtagctaattagagctaacaacaataacagctttaagataaggaaaccaaaacagaaactcactcctgtgctctggttaaagatgtcaggtattcagggcttggcttaatttggatgcctggaggtgagaaaaaggtgtgggattttaacatacttgtgaagttccaggcttcttatttactctgggactttcaagacttgagtaaaggcaagacaccataagcagatcacatgggagccttgaccacagaagggggaagatgggatatgaatggataaatgaggaattcaggatttgcctaaccatttactcctgcctcagggtgatagcctggatcaaggggtcatatgagctcacaggcaggcacttgggagctggtcttaaaaaactgggaaactagacgagtcttagagatttcccatttcaaccaactcctatacgggagcaaactgaggcccccatgtgggaagagatacggcagcccggtttgctgaaaaagagtccctgcttagactctgcttggatttatgttcaagtcctggctctgttcctgaccaccgagcgacctcagttaaggcccttccccttcccttaaaaagaccttaggtcctttttaagatgaggtgagtaaactagagaatgaattgggtcccttctggctctaaaaccctcttaagtgtcattcattcattcatttcataaataattgagtgctctttgaacatcacttgggtgctaggaatagaaggttgaataaaggacagtctcatcacatgtcactgggcgcaagagcatgtgcagacgagtataatcccacggccaagtaagaaaacgatggtgtgtactaaatgctaggggaacccagaagcaaaagtgactaattctttgggagagttatgaaagactttatagcatggataacatttggactgagctttgaagagtgagtaagagtttgcctgggaaagcagggcttgctctaggccccagtgcaagttaatagcttagagcttagggattccgaagtctggagccagactgcttgggttataaatcccactccaactactagccgtgtgagtcaccgggcaactaatttaatttaccaagcctcagttcccttatttggaaaatgggaacaataatatgtacctctgaatttgtggtgaggattaagtaagataattcacataagaggattagtgtaatgccaagctcacagtgagtgctcggtattagctattattattgtcattattaccctgggttcaacttttatctctccaacttcctagctgtgtgatcttgggtgagtggcttagccattctgagcttcaatctcctcatctgtaaaacgacaatatgatctacttccagtgattttgaggattcgatgagataatgcatttgaggtgcttagcacagtagatagtacctggtggttactgttactatttttgctggtagtgctgggaccacagcccacctcacagtggtactggggactggatggccagagcaatggtctgtagcttacctgtgccttctgtgccttcccctcctccccaccaggtaccagatccacacaggactccagcattccatcatccgcccacagcagcccaactgcctgcccctggaccaggtgacactgccacagaagctgcaggaggcaggttattccacccatatggtgggcaagtggcacctgggcttctaccggaaggagtgtctgcccacccgtcggggcttcgacaccttcctgggctcgctcacgggcaatgtggactattacacctatgacaactgtgatggcccaggcgtgtgcggcttcgacctgcacgagggtgagaatgtggcctgggggctcagcggccagtactccactatgctttacgcccagcgcgccagccatatcctggccagccacagccctcagcgtcccctcttcctctatgtggccttccaggcagtacacacacccctgcagtcccctcgtgagtacctgtaccgctaccgcaccatgggcaatgtggcccggcggaagtacgcggccatggtgacctgcatggatgaggctgtgcgcaacatcacctgggccctcaagcgctacggtttctacaacaacagtgtcatcatcttctccagtgacaatggtggccagactttctcggggggcagcaactggccgctccgaggacgcaagggcacttattgggaaggtggcgtgcggggcctaggctttgtccacagtcccctgctcaagcgaaagcaacggacaagccgggcactgatgcacatcactgactggtacccgaccctggtgggtctggcaggtggtaccacctcagcagccgatgggctagatggctacgacgtgtggccggccatcagcgagggccgggcctcaccacgcacggagatcctgcacaacattgacccactctacaaccatgcccagcatggctccctggagggcggctttggcatctggaacaccgccgtgcaggctgccatccgcgtgggtgagtggaagctgctgacaggagaccccggctatggcgattggatcccaccgcagacactggccaccttcccgggtagctggtggaacctggaacgaatggccagtgtccgccaggccgtgtggctcttcaacatcagtgctgacccttatgaacgggaggacctggctggccagcggcctgatgtggtccgcaccctgctggctcgcctggccgaatataaccgcacagccatcccggtacgctacccagctgagaacccccgggctcatcctgactttaatgggggtgcttgggggccctgggccagtgatgaggaagaggaggaagaggaagggagggctcgaagcttctcccggggtcgtcgcaagaaaaaatgcaagatttgcaagcttcgatcctttttccgtaaactcaacaccaggctaatgtcccaacggatctgatggtggggagggagaaaactgtcctttagaggatcttccccactccggcttggccctgctgtttctcagggagaagcctgtcacatctccatctacagggagttggagggtgtagagtcccttggttgaacagggtagggagcctggataggagtgggtgggaataaaccagactgggatgcctgtgtctcagtcctgcctcctcacggacttgctctgtgacctcaggtgacccacatgagcttttagcctcagtttcctcatctgtaaaatgagctctaatgactttgtgactctttggtgtggccctggagcctggggccacggtggagttcctggccggccttgccacttgacaactcctttaaggcttcccccttaacacgggatccctgtggtggtgtttgggagttgcctggaggcaactccaagcctggcccccagctgaagcatggcaatctggctgctctctacagggacccccaagcgctgtgggtggagggcaggggtcgggggggttgaccttcttgggtcttcacatggcctaggccagtcctccggtcagactggtgtcaggcaccgtggtgcaaaattcctcttctggcccctccagtacccagagaaactggctgggccattaactgctgcagcaccaagggtggtagaaagagctgtgaagagcccccaaaccagtaccaggacacctgggttctcctgtgacctggggcacagttcttgccctctaggccttgatttccccacctgcaagtggggatgccagccctggctctgcctccttcatgaggctctggaagactggccaaggttgtggaggagcttgtgaacttgattaaagtgtcgtaacatggaagtgagggatgcagtgctgtctgactatgagcatgtgtgggtgtgtgcatgtgtgtcctgggggcaggtatgagctcacggtcggccgagtgaacaggagaggaggtggacagcctggctaggcggtgggggaatgggagtcctgccacagacccactatgtgacctcaggcacatccctgaccctctctgggcctcaacatcccactatgttcagtgatgatctaagagcacttcccatttggccattctgggctagtgtgcatgtgtgtgtgttggggtggggggcaggctgagtggtagcgaggaggccacgggtgttgcagagcccgcctgccgcctagcgcgcctccatccgcacactgcgttctgcatatctcccttcaggttccagtcggcgcagtgtgtgtaggcgaaagccctgctgtgaatttttaaaatagttatttttgtcactggcaaaggaggcctgttaggactcatcagcttgtggatgagcaggatgggtggggtggggtgggtgcggtatgtgtgggggttcaggtattggttacagagttccatccccactgcagatgtggctgagtccaggagtgagggtctggcctgaggctgttgggtggaggtgaccattcatgctctaagccccttcctcctggccctattctttttaccccttatcacctcccccaactagcatctttccctgcctctatgatgttgattcccagctgtgtcatggggcaggagccaggataggcagaggcctctggattccagtgacctccagcatttcagtctgctcaggagggaggctctgaagaagtaagtcacctgttagggcggtggcccaggcctgacacaccctgggagatgagctgtccgtagttcgcccactcctcagggtactctagctctgctgggtgcttgtcccagctgtgtgggtggggcctttccagggtggcatggagccaaggcttccctgccactccgggcttgcacgagttgtatggaggcctctcctgtgcctgctgagtcagccctgcccgaggcctaccctccagctccagcccccacttctctcccggggcccctgccctttggcaccgcaagtgcaggaccgtgaatggccctttctgctgtcccctaatcaccgaggcttactgcctgtgaccaacctaaaccaagaaagactagctggggatggggctggcacctgttcctggtgccctgagaaggagacttgaccccaggtcttggtccagtctcaaatccagcccagagcttgcctagctgagtcctacccaacccagcgctcagcaaacagcccggtggccccacgcaagcttgagcctgcaacctggtctagaggagctggcggctggcctaggcctgagattggtggagggtcttgggtgccccagagcactcaagcactacgataacaggctcagcctgtggtgacttctgctcttcccagcaatcagcatggctcctgccagccccctcccatctcctgtggcccaagtttcctccagccggggcacctgggtctggactctgtgccaggccgccaactggcactgccaggcaggtgctcgtaccatttgagcacctgtgcttgtggggagggaagggagggcagatcagaggcagctccggtccctcgggccacagatctggggaagtggagcccagagatgcctggtgagaccccctgtttcttccttggctgcaccagatggcagctgatctgccagctgtaggggccagagccagggggcagcctgtccaagctgggccctgccagtagagtcctgggctctggtaacccattccccaagggccaagtgatagccccacacctggatggagggccagtgctctgggctccatctttctcaggaggaagtggaggttctactggggagacttcctgcaagctcttccaggactcgaactcaggtcctctaactgcaaggagtgctatgcagccatcggcccagtagccattgtcctctgtcccatggctctctgcttcactctcccctgcaagagtgcctcctgtgtgggagacctcagggacagttctgctccctgatccctgacttcccccacttcttcatgtaggcctagccttacttactgcaatgaatgaacccaatctccctccacccagaccctcagcaggaccatttctctcttggcccactttccaccaattctgccccccatgctcactgcccttagtgggacaggccctgtggggaccctttggatggcacactttctgtggtgcctgcccaggccctgcaggaccctggggcacttgggcatatgtgtgtgggctgtggaaggtgggatttcagtcagctgtcacaatgccactggggctacaatcacccatgcaggaacccagccctggtcacttttcatcccttctgtctctgtggagcactgcctgtgttcacgtgccaatccctattctggcatgtcaggactgggttcagcaacctccagggctcccacccctggcgaccagcccatagcatggaggcctgctctcgaataccacacgcgtgttgcagatgggggcacacgtgctgcctctcgtgtctgctttggccctggggagtggggagtttggcaggaacagtccccctcctgcaatcatcggctcattctctcagcgccacagaggcacggctggctcctcagtgcccgccaccaccgggcacagctgctagcctcgcgggctcaggggaggtggtgaattagcagtcatgccttctcagcagagtggctattaccctcaggaaggtggggggtgcctgtccgaggcagtgcccacaccgctgagctaggctctggaaggctcagaggggtgtgtgtgtgtgctcatgtgtaagactttcagaggggacttcttcctcttctccctcctcttcttctctcttccgcctctccagccatctctctgctatctggatcctgcagccctcaacttgcccatcccccaggaccgcatgcacagtgcaggccagcaggggagggagagaagagtgacagaaagagagggagctggaaaccagaaaggaagtaaaaaagatgagaaagacggagaactgagaaggaaggatgcaaaagagggaacaggaaaaatgagggagaggggaaggcaagaggagagaagaaaggagagtggaaaggagagatggaagtagggaagaaagagatgacaggagcggggctgtgctggccctgctcccagcagccacagaggctgcccccgtggtccacatcacatacagggagagaggtggccatcttcctgcctccattccttcacaccttcctctgagggacctgatgccagggtcttccccatgtgctctgctcacttctgagcatgctccatttcatcagtgggaatcgggagaggaaacaggggtcaggccagcacccagccacgcaggactgtcccagttcagaacattagatttccattaatacagcctcataatctcacagcatagttgcttttttgttttactgtgaatttttaaaacagcatcatcattcctttggcacccgatgagctggagagccttgtggttcctctccttctagctctagttctttgttctacagaaattgctgcaaactaggcttagacaaggtgatttccaaaccatgagctaaactccagtgcagactaagggaacagtgccctgaagtgctgggactcaagatgatggtgtgtgcttccgtgattcagggagtggtgtgtgaggggagaggacttttgagtttcttgattataatttcccatttattgagcatttatagtgtcagccactgtgcttgtctcatttaatctacagaacagcctggaggtagggaatattattgacccaattatgcagatgaagacacagaggcacggagaagttaggatattcatccaaaatcacatagcccgtaagtcgtggagtcaccctaactactaagcaacactgcctctcctgtccctgtgcaatggcaggtggccttggtggtcactaagggctcttccagcactttcttgtgtggaagccatcccctcctgggggacaggctagagggtctgggacaggagggtggcagtgcagccctcccccacctccccacataggcctgtagcttggccaccgtgttctgtgccctgcctgctgcccactggctgtgcggcccccaggcataggcctctccactctgcctctgaattgcaacgttggcggcagaagcgggaagcatattgtgcgcagaaacaaaactgagtggttttcccttttcccaaaggtggtaatggtgcaattagtggctaagccattacccccctcctcccttgctcacttcccctcttcccctctgccaccctccctctcccaccctccctctcctctcctgggaacagcggctgaatgggtgagctcaccctttattctcccccacagcccactcccaggaagaagggcagaatgggagggttatccagatgtctccagggggcccctgcaagtagggtagtgagtcagggacttcgtggggttggagaataccaacaagcagataacatgtcctgcaagtgagaggactagcaaggcaatgtggagggtcagagcgggtgggctagaatccctgagggtctggatgcctggatccttttatccaacccatgctcgctgggggcaggtgctggcatgaagcctctgcccatcaagctgcgaaatgggccaaggcaccctttttcctcagtggagaggggaaggggtatgcagggtctgagatgccaagcccaagctagagtgatggggtggtcacgggccagctttaaaccttcattttcctcctctagagcctagaaagaggcctcctatttacatagttcccaaaggccttcacagcccttagcccactccatctccacagccttcccctgcagggcatcttcattcccctgttgtgtagaaaaggagctggaggctcagagagggtgagtgacttgcccgtgatcactcagctaataaatgtccaaaggccgggcatggtgcctcacacctgtaatcctagcactttgggaggctgaggcaggtggattgcctgagctcaggagtttgagaccagcctgggtaacatggtgaaaccttgtctgtactaaaacacaaaaaattagccagacgtggtggtgtgcgcctgtagtcccagctacttgggaggctgaggcaggagaatcacttgaacccaggagacggaggcttcagtgagccgagcttgcaccactgtactccagcctgggtgacagagtaagactctgtctccaaaataaataaataaataaataaataatataaataataaatgtccaggaatcagagctcaaactcagatccttagtcttaaactccagtcccttttcttcctaactccaagaccttggagtaagatcttgtggctgtaggtatggctgatgccctgaagagttgaagttggcagggaaggtgcccagaaaattttggattgaagatttcatggcaagtctctggccagtggcctagcccgggtaagccatgctatgctcacctccccacagccccctctcgcctttttttttttttttttttttaccttgactggaagcacaagcagaaactgggacatgagcaccaggagaccagatttccatggtcccgttgggggcatggggttggggagaggttgcagaggagggctctggaggggagcaactgtcacagctgtgagaggtgggggtgagcaggcagtcagggctgttccctccagaatcctggggtgtcctctgcacttctgcgccaagctggagtgctagtgtgatggacaaggtggtaagagagctgaaagagcacgagcataacaagaaagacagaggcagaagcaaaaaaaaaaaaaaaaaaaaacagagggcaacagagagacagttacagagactacagtgatccacagagggagagccatccctgtgaattagccatcatttccctgtaaaccttagaacccagctgttgccagggcaacggggcaatacctgtctctctagagatgaagttgccagggtaactgcatcctgtcattcgttcctggggaccatccggaatgcggcacccactggctgttaccatggcaactgcctttttgccccacttaatcccatcccgtctgctacaagggccccacagttggaggtgggggaggtgggaagagaaaagatcacttgtggacaaagtttgctctattccacctcctccaggccctccttgggtccatcaccccaggggtgctgggtccatcccacccccaggcccacacaggcttgcagtattgtgtgcggtatggtcagggcgtccgagagcaggtttcgcagtggaaggcaggcaggtgttggggaggcagttaccggggcaacgggaacagggcgttttggaggtggttgccatggggacctggatgctgacgaaggctcgcgaggctgtgagcagccacagtgccctgctcagaagccccgggctcgtcagtcaaaccggttctctgtttgcactcggcagcacgggcaggcaagtggtccctaggttcgggagcagagcagcagcgcctcagtcctggtcccccagtcccaagcctcacctgcctgcccagcgccaggatggccaccatcacctgcacccgcttcacggaagagtaccagctcttcgaggaattgggcaagtgagttgtgcctcaggaagtcctggaaggcatggggggcggggaggtcagggtctctagtggggtgtgtgtgcctgcagtgcttggggagcattccttgtacacagatgaaggcaggctgcatgggtttgggggcacctgcctgtgtacagagtgtccagagtcgggcgtgggtatgtttgtgggtgcacagatgtgccaagctagccaggccagtgtgtatgtagggatgaagggttgacagtgtatgccagtgcacacacatacacacaaaatgcacacaagtacacacaacctggatacacacagattcttagagacttagggttaaaaagggattttcctagtcagctgggtccaaagctggaattccttctctagttttgcttgaggtggccatccgccctccacttagatacctccagtgacagagaattcaccagctcccggtagttcttcctgactttagacacccacagtgactgtacagagtggccaacttctccctccctacctcccctttctcagctcctgccaggagtgagggcgtcagtacagtaggggttaatatctgagcatgacaggcttcccgggtgttgggaggtggggagaggaaatcaggaaagctgtagcggggagcaccgctgtttcaggggctagggtatgaagggtgcagtggctctggacaagcaaagttgcccagcccagagctcattttctgccctgatgactgctgtgtagagaaggatgggaggatgaggaaagaggggaggcccttgtgggtggcccagtagggtgtggagtgtcagggagggattcctggatgtccccagctgggtttctggaggatcctgggatgggtcaagggttgggtgcattttggaggcagagtttgccttgtgggcaaaggagcaccgatgccctggttggtttctgctgaggcagcaggagcacggggggaggggccctggaggcaggtgtgtattggtgtgagttctgaatgtgtgtgtactagtgtgcattttgaggagtgatgtgtgtggctgtagaagggcttttgagggaaattgcttgtgacactggggtacgctggtgtgccctgccagggtgtgcaagcattcatgcatgtgcaccaggaagaggtgcttcgtgtgtaaggcctgaaaatgcaagtgtgccttgcaagggtgcatgtgtgtgagtattacaagagtgctgttggctgggttgaatgagaacaagggtgtaaacatgactcattaaatgtgcacatgtatggcaggttagagctgtgtgcacataggaaggcacatgtgtgtgaggtctaggggtgtgtgaggatgctcatatgagatgcggacacaatggtgttcctgtgaggtcttgatatgcacatctacgtgaagactggggtcatgcacacaggatgatgtacgtgtgtgtgcacacgcatgtgtgtgcatgtgtgaggcctgggctcacagggttatgtgggagtatgggtgttataggcatgtgtgagctcatgctggtgtctgcatatgtgtgggaggtggccctgtgactgtatacaggaaggctgcttgcacacacacacacacacacacacacacacacacacacacacagaggctatcctacaggcatgcaccacctcccttgagcacatatacccccatgtgtacgtgtgttcactcttatctgcagactttcagcttttctgaatgtgctttttttgcgggtaggggcaggaacaaaatgtttggggctgctctggaggactgaggctgtctacaaacttgtgcagggacccctctccaggtgttttccagtgctcgcctagaacccaagaattccctgattagccatgaagctgcctttcagggagtgaccaagactgggtcctggcaggactgcgtcatgagtacagtgagatggagttgagatgtgactcaagtgctcaaagtgaaaataaaagtgatgttttgccccaagaggagatggatatcattaagactgggttttgtgggggcaacttggtagagagacccttcgtgagccttcacagagaatttcaggggcaagggagccctggtgtggccatggcaggaaaaccgagggtagcaggcatagctaggccttgtttaatcaatttcagacttcttccttccagaaccatcagactgctcttaaccttttttaggtcacatattccttcaggaatctgatgaaagtctaaatctacgttccccagaaaaacgcacaaacctacgaaatgttgcatgcaatgtcaggagcttgcagggacatcgggaagactgtgtatgagcctaagtttgcagaagcttgtgttagagacaaggggataaagtggactgattccgcacccctgatgtctgtgttaaaaagtccagaccacatcattgaggagcctggggctcctgctctccacagcagcttcagtctgagcatccagtggtgcagggaggggcagtgccctgcgtagccactagggacacaggcgctgtccctcatcacccatagctctgtgacaccaggcaggctatgctacctctttacccccacctgtagtctggagataaaaagggctgtgagcattcaatgagatggtgcatgtagagatgcagcctcgagcctggcacatgacaggcccccagggccgattgctactggggtgactgttgttgttctcaaaggctgggcaaggctgaaagtgaggaatgggatctgcttgtaccttttgtctggagttggcccatccggggctgggaggaggttgaccaaaccgtgcttcccccctggctggcctcttctgtgggaggaagctatgagggtacctgcagggcccatccttcaattgatgatccaccgtccctgccagctgggacactgcagtcaccacccaaaagctaagcccccgttccagaacccacttcagatcactagcagggtgactggaaaaggcagccaggttggccctaaaagggcacatgggagcctttgggtctccttcaaggcgttgggctgcccagcaggagaggagggcaaatccctctggagggcttctggcatcctgcccagtgaggtctggctcaggactgcaggcctttgaggagccccggatagggctggctatggatgtgagagtagctgctcttctccagccctggtgggcagccctctgggaacctgtgactggggccagg

SEQ ID NO: 97 - DNA, 1220 bp, Homo sapiens
cctccccacatcatcttcatcctcacggacgaccaaggctaccacgacgtgggctaccatggttcagatatcgagacccctacgctggacaggctggcggccaagggggtcaagttggagaattattacatccagcccatctgcacgccttcgcggagccagctcctcactggcaggtaccagatccacacaggactccagcattccatcatccgcccacagcagcccaactgcctgcccctggaccaggtgacactgccacagaagctgcaggaggcaggttattccacccatatggtgggcaagtggcacctgggcttctaccggaaggagtgtctgcccacccgtcggggcttcgacaccttcctgggctcgctcacgggcaatgtggactattacacctatgacaactgtgatggcccaggcgtgtgcggcttcgacctgcacgagggtgagaatgtggcctgggggctcagcggccagtactccactatgctttacgcccagcgcgccagccatatcctggccagccacagccctcagcgtcccctcttcctctatgtggccttccaggcagtacacacacccctgcagtcccctcgtgagtacctgtaccgctaccgcaccatgggcaatgtggcccggcggaagtacgcggccatggtgacctgcatggatgaggctgtgcgcaacatcacctgggccctcaagcgctacggtttctacaacaacagtgtcatcatcttctccagtgacaatggtggccagactttctcggggggcagcaactggccgctccgaggacgcaagggcacttattgggaaggtggcgtgcggggcctaggctttgtccacagtcccctgctcaagcgaaagcaacggacaagccgggcactgatgcacatcactgatggtgtcaggcaccgtggtgcaaaattcctcttctggcccctccagtacccagagaaactggctgggccattaactgctgcagcaccaagggtggtagaaagagctgtgaagagcccccaaaccagtaccaggacacctgggttctcctgtgacctggggcacagttcttgccctctaggccttgatttccccacctgcaagtggggatgccagccctggctctgcctccttcatgaggctctggaagactggccaaggttgtggaggagcttgtgaacttgattaaagtgtcgtaacatggaagtgag

SEQ ID NO: 98 - protein, 395 aa, Homo sapiens
PPHIIFILTDDQGYHDVGYHGSDIETPTLDRLAAKGVKLENYYIQPICTPSRSQLLTGRYQIHTGLQHSIIRPQQPNCLPLDQVTLPQKLQEAGYSTHMVGKWHLGFYRKECLPTRRGFDTFLGSLTGNVDYYTYDNCDGPGVCGFDLHEGENVAWGLSGQYSTMLYAQRASHILASHSPQRPLFLYVAFQAVHTPLQSPREYLYRYRTMGNVARRKYAAMVTCMDEAVRNITWALKRYGFYNNSVIIFSSDNGGQTFSGGSNWPLRGRKGTYWEGGVRGLGFVHSPLLKRKQRTSRALMHITDGVRHRGAKFLFWPLQYPEKLAGPLTAAAPRVVERAVKSPQTSTRTPGFSCDLGHSSCPLGLDFPTCKWGCQPWLCLLHEALEDWPRLWRSL

SEQ ID NO: 99 - DNA, 210920 bp, Mus musculus
  misc_feature (1)...(210920): n = A,T,C or G
taggaaagagttatttttactttaagcaatttctattttttacatagttggtgtttttaaagtaggtagacatagcattaaacattattatcttcttttatctgccaaataatttgtaggctcataaaaataagataccactcatacaaaaaggaataattagcagatagtgaaaagaaatgaaattcttcaattgactgctatattccagtgtggtcttgtagactctgtgtgttgctgtgtgctagtttcaaagtttatggatcagaaatttaaaaaaaaaaaaagttgctcaggtttccatgaaaaagggaattccagactgatattcttaacacagaaatgtatcttactatagtttcatttatattgctataaatagttgcctcggccatgcagggagctgggtgggtcatctcaggattgttccaatgcagtttggatttaaaaaaccagattgtccctgagctccttcaagactgcacagaagctatttttagaaaggcagaagagctcagcacttgggaggcagaggcaggcggatttctgagttcgcggccagcctggtctacaaagtgagtgccaggacagccagggctatacagaggaaaccctgtctcgaaaaaccaaaaaaaaaaaaaaaaaaaaaaagagagaggcagaagaggctctgaaggtgcctagttctcctctgtctttatctcctctctgtggctcacttcaaaataggaggttccatgtgttgattctcatagtgaccctcagagaacagcagcagcggcagcagacttaaatgaccagttcttacatgcaagttgtgttggttatttctttggtatgttcaagtattatttctgtgtcttgatagggtcctactggggtcaggggagagagattcagtgagtcttgggcactctgtccaaatggctgtgtttcagcaaaggccctaaaccaggcagctgtgtctagaacacccattcatttttcactaatatacttaccctttgccatcatttaaagtctctcctctcctctcctctcctctnnnnnnnnnnnnnnnnnnnnnnnnnnnnnnnnnnnnnnnnnnnnnnnnnnnnnnnnnnnnnnnnnnnnnccaggacctcactttgtagaccaggctgtcctcaagagatttgtctacctctgctgggattaaaggtgtatagcaccactaccaccaccatcaccatttaaagtcttaaacaccgacataaacagctgagaggcaggccggacatgtttgcagtgggacagaaagtagggaagaacacaagctatttgggatgatgggaaagtagcttttgtaggcattaacatttaaatttggctctgcggttatagttcttaccaccttcccagtgatctaggaatgaatacattcttaacatgcctgtttttaatcagaagacagttcattcatatacgataatgttttcacttcagacagcaccccccacccccggctgctaacgcagtataaatacaaacattttcttgcccttgagaaaattcaggcctctcgagtgaacacagaaataaatggaaatgctcaagtgatctcagctaagctgaaccaagctaatcagtggcatggtgtttcctgacgcctccgctaggccacaagaaatgtgctggtgtcacctggctgtgaagcggaggtcaggtgtctagagagtgtggcacacctttctcactggaggccattcatccctgtggtccacagcatcagcctccagcatgtctcctctacctgcttcctgctagatttatccttctgggtatccatgtctttaccagcggagccagctaaatagagccttgaaaacagcaagtgggtggctggtaatgtggatgtccttggtttagctgcaaatactgtaggcaagactgaacttgggcgggcgtcgtaagaactagagacacctttgcaagaatccatggacgaaaggcatctgctccttctattcttcagaaaagagtgtttgttagcatctcctacgtcgttttttcaacacagacatgaaatggatggtcttcttcatgttacacttaacctatggcttatgatattgaaagtgatgcatgctgggaatatctcagtaagtacacatgcatgaggcaggaaataggcttttttttttttttttggccgtttctctcagtctcacagaggtaagccatttctgtggctttgatgttttccctctaaaattcaaataccaataatgttccgagattcatagagcaggctagataaaggtgactaaacctggggatttccccaggggagaactctaaagctttctggagggtgctttcttttacaaggtgacagaatacttaaagcaggaggttgcaaccctgtgcagaccgtgtttatagttgctctggccttggccttgttgcctctataactgtgggaaataaatgtctatcttgatgaattaaccagctgccagtgttattttaaggaagcatccaatagaccaaggcaccggtagccagcctcctgagaagtgtaacgccttgcttgctttacttgtttgttttgatgagtttcggcattgattcagagccctagcctatagcgcaggctggtggcgatgatggagagctgaccatcctggagctttagccggtctggatctcccagcagcactctccctacctccggctcccaagtcctggcattacaggtgtgagctacacgttcttgcctattttcattccaggattcgcagctgagctatttccaggtctcagcacacagctgtctgtcttagcattttcgtaaccattcagcagccaccatattggagggccgttcattgtcacattgaggtcacttgtggtagaagaaatgattccatggacctcgctgttgcttcagttagacacttttcaactgtgcctttttttaaaaagaaagacatttttcacccccggtatcacgttctgtgcaccatggattggaatgagaccccaggcaagatctgagcctgctcagaacacagctttcatctctgaagtcattggcttaacttcaaggggaactactttgaaagaccatcccatctcttccctctggatcaacttcctactgtcaacctgggttgcctagagaaacctgtctcccataggaaagatgctcccagtagaagggtacttagacgatgccagctggccctcgtgccagtggttgccctgaggatggcatttaaattggcatttacagcacttttaaaggtaggagttagcaagctgtgtatcatcctttggtgtgcatctggctggtggaagcataggttgttgtgctcagcatagcgacggagcactctgggtatcctgcatgcctggttagatgttccctttagagccctgtcctgccctggggggtgctcttacagtttattctttcttacacctgtgggcatcttttcagattgcttctccacacttgattcactctggctttaatttgcttcactatagctttgtaaaagcaaaaactttttaaaaagaaaaagatttatttatttaatgtatatgagtacactgtagctgtcttcagacacaccagaagagggcgttagatctcattacagatggttgtgagtcaccacgtggttgctgggatttgaacttgggacctcttcatactgagactgtgctggagttacacatcggaccgatgatgtttaagtctgactccacagtaggactcacagagaccgtcaaaaaaatatttcactggggtctcatccccgaaactgacaaacagcttagagtaagatacaggtagttggggtcaggagccacagtgaactcatttctgcagttgggaaaactggggcttggaaaagacacttgttaccccagggctctgaagttatagaagcagatgggtcagacttgcacccctgactctggcatggcctacatttgcataacactactactgctctcaagtcctgccttacccggatcgctctttaccttttccacgacacagtgttggtgtgtcctaccacctgcaccaacttagtggcctccactgccatttgaagaatggatattatgcaaatgttcatttctgctgtcttacagaagagagtctctttgtacgagcaatctgtatttgttagtagacagatccaggtctttctatcggagaacctggcatgccttgattttttttccagtctgctgtgttgggacagaagcacggggtcactttttggctcctactcagtactgttctcttgaatcagaaaccaagccatgaccttctctctcgcagtgccctttgtccagcaggaggactggggacaaaagatgtgtcttcaccttcccagggcttctctctgggtttccaatcctcccagacaacctgggaagcctttatcttcctctgctatgcagtgagcagctcagctaacacctcctgagaatccttcaaatcgttccccaaagaaaccactctgctgcagatgcctatatttagacctcataaagcccacatcagatttctgctgcctttctctcaccgctctaagcctgctgtttgaaaggcagcaggctcttttgtctttaaagttcagcactggctggctggctcccaccttgaactctaccgccttggaatgtcctaggacttcttcttccctcattctgaccaaactccaaaccacgggtaataaataacctttacaccatagaagtagaaacaatacaacagggctagaaaatatcttcccaacagggccacagctaagtgaacaagagtgtatttccacatgcctcaaggttcaattcatcccagatgcatttcactggttcactagactcctgtggcctgacggctctctaggtgtctgtccgagatcagagcatagttgatggttagtagcataagatgctatcaagttgaaactatcaagttcagtatcaaactgcatagaacaggattaaggtgttgacttggagcctggtttgggctttcgggtacatgcctttaattttaggaatgagtttgaggccatcctggcttatagcaagttctgagacagccattgatacatagaccctgtctcaaaaataaaaaaaaaagaattttttttttttaaacaggggtatcattgggattgattctcaggtctcccaattcctagctgatcaggttaattatttgacgggttatcacttacttcagtggtattcactggctggctttcactcacttgtctgtgtctccatggcatttctgctttctacctaaggagaaatttctttcattgtcactttctgttccattagttagtggtgatgccacccagagggacttgtctctgtcttctagttagtttagtagtcccagattcatgccgactgaaactttgtcacattctgtagcatagatgaagagaacaggtgtgtgccttcagaagttaattggctcttgctgagtcgcactcagcccatgaacatagatcctagatatccaagtggtttttgctgttgtcttttaaggagtttgacatgtacaggttcatatgcatatccaacattttattagggcacaatattgtcatcggtaaagttcacactcttctagagcctctacagaattccttcgagggaaccaagccatagagccattcccccacccccaatcttacaatgtttcagataagtttatgatcttgctttaggctgtatacattgctacccacggctcatggcactgtattcttgcggttggcttcacgtctggttgttttaaacaactgattggtgcatgctgtcatccttcggtataacactgcagcctgtgtcgtggccttggccttgcagatgaacctgtggttggttgcaagtttttgaaagcattagaggctaagaggaaagcaaggctatgaatatacacacttaggagggggcaggtgtctgtggtctttccgtgctcctcattctgtggtaccttgttatatagcctagcctgatgctctcagtttacctgcctcaagctgtcaacatattagcatctcatcctcttacgtgggcatcaccatacctggctgagctgtatttcatttttcttcttcattcatcctttttcagtcttttatttttataattttaagtatgtcccatatttacacacacacacacacacacacacacacacatatatatatatatatatatttacaaatacatttgcagatacttcctccagtctctcttgggtcccccatggctcctcttaaactcatcgtttcatcttctttagttattattcttacactaagatagacatatgcatataataacttggaaggatcaagctagatctgcctcctcttgaagactagccttcacagtactgaagggtgctctccaagatgccaagagagaaagtgaccgggagtcctacccagcagtgataacctatgaaccacaacagtagccagaatggtaagctatcccagagtgcaacaggagctcttacatgctggcgctgaccagcagctgcctaataggatggaattcatgctgtaaacctagccagctggcgggcacctacttcacctcccaaaccagtatgaccttgagctacattcgtaatacttactcttaacaggtgtggctctcacccctcgtcagagaaggctttttctgaagagatggagaccattgttgaaacgggcctactgatcaaagcccttttacaaatgagctatttcttggcattactttttctctttgtttttttgtttttgttttttcaaaacagggtttctctgtatagtcctggctgtcctggaactcactttgtagaccaggctggcctcgacctcagaaatccgcctgcctctgcctcccgagtgctgggtttaaaggcgtgcgccaccacgcccggcttactttttctgtatgctctgattggaatgcagagctactgaaattcacctcttgattgttctgggataaaattaagcttattataaataagatttctgctgtatttgcacttacatgcaaccagcacactgtggtgatgaggttacaaaacagatgttttcctcagtgtgaagtcctgacaatccccgccttcctcactgcactcagtagcatccttgtctgttacactccagaccccggatgcctccccccacctcaggtcccttgtatcactgctagtctcctggcagctgcttatgaaacctaacgtttattggactctcccctgctgctttcttataaattacagcatcgagtaagagacttgacacagcggcatctcttaaacatgagttttctaaggtcatctttcctcacagtcctcacttctggtaattactccccccaccccccaagattggtgtcttagttcaggttttactgctgtgagcagacaccatgaccgtgtcaactcttataaggacacaacattcaataggggctggcttacaggttcggaggttcagtccattatcatcaaggtaggagcacggcaatgtccaggcaggaatggtgcaggagaggctgagagtgctacatctttatctgaaggctgctagtggaagactggcttccaggcagctagggtgagggtcttaaagcccactcccacaatgacacacctgctccaacaaggccacatctccaaatagtgccactccctgggccaagcatatacagactgtaacaattggtattggatgtagaatagtctagaggcctgaatggacacccaggagaagagacatggttaggaacgttgctttaaatgtgactgactgccagtacattctccagttgcacaaaacaacttgtagggaccttgagacacacacactaggtcccagtcctgaggtgttcctttctctggttgtttcagaatcctcggctgcctttttcagtgtatagtgtgcttggtaattctcttttcctctcagcaatgttgtgcctctttctgttctatgtgtggggcacgctggcgctcacttctattttctccctgcgtgctgagaattttcgttttataaccacactcccagatgttaggcggggaaggagaaacataatttttttaaatatatgggaaaataatgaaggttgaaaataagatctgaagggagagcgtgaaggttgtccttgagcagtggagctcagggagtatttgtgacaaagcaggaaatccatggctgcctctctagagtggattgaaggtggagcagggttcatgactgcagtatccaaggaccaccagcagatggggatggtgatctcttggcccaggtaggatcaagcatcctctttaactcctcctcattatcatcactgaagagtggtaccatttgccaggctgatcccaagcctcttaaagggaagcaagcaggcaaagacttctggctctgctgtcgacatctctctatattcttgatccttaaatggagcacattcctggctgtcttagttcgggttttactcctgtgaacagataccatgactaaggcaactcataaggacagcatttaattgggtctggcttacaggttcagagggttcagtccattatcatgaaagcggaaccatggcaacatccaggcaggcatggtgcaggagaattctatgtcttcatctgaaggctgctagcagaatactggcttctaggcagctaggatgagggtcttaaagctcatgtccacagtgacacacctactccaacaaggccatacctccatatagtgccactccctgggccaagcatactcaaaccatgacactggcattcaagtgggaatttacattgagccttgggccgtggcacccctctatcttgggctgtcactgggtatcctagacaaggttgagtctgaggggtcatgggctttctctttttgaccattggattcaaaactgaatttcaaaaccagtgcctccaacatgttggagacattggtgaaaagaaaaaacatcctatgttaattaatgtgcactggggtatggattcgtttagtgagcagtgctgaggaggaagccagggtcttgtacctgctaggcatgagctcaggcagtccacactatgcctcttgagtctgtctcctcattgagggaggcagaaaaaaagtaacgggggctggttgaaggctgtagttcagtgctaaagggtaaggaagggctaaaagcagccttgacggtggaatgttgttctcaagaacaccagggcttccctgctctgtgtaggacaggaaggaggtctcggggcttcccttgccaaggatcagggtggtttagaatatgctctgtgtcactaagctaaaagccagccagttttagtgaataaaaataaaagttcctttggtctttatggggatgacaagaaatgtcccgagggggcattcttgctcccttagctattctttctaacattttttgtagccatttaggaaccagtcgggaggactgtccttccttgctcccagatactgtgtcactcattgtaaaggggggcattccaaatagctgagagactcagaggttccaggtcacctgcggcagactgtacgtgagtcttaaaacttggctgttaacttccaaggtgcagtttggctgcagggcagcattacagagcttgagttgttccctaggtctctggaatccaccaagttccgcctatagtgtttggccaggctgcctctgggatgagctgtttctgtcttccccacgtttgaattcgctcacgctttgagacaggcaggcatcagcaacagcagtttttagcccagacagctctcagcaccgtcagctcagcacagcttcagagggctctgcctggtgggaagctctgcagggctctacctgggcagtagctacagagccctcccctctcagcaccttgctccgcccactcgttccaggctgtcgattgccggtagggaaactggagagaccaggattcctcttccattcttgctgttgttaaggaaaacagaccaaccatctgcatctagaccagccttcctctccctcgctcccttttagaggaggttttcctgcctggaatctggtaagtgtgggcaaaggctctgtctcctttcttggtctgtgcagaacggtctcgtgttgtggatctgtgagctttaacctacatgtgctagaatttagaggagtctttgagcttacaccttctctcgcttatagtgctccttgaatatttttagcatgccttgatacctgtatcaaaaatatagcatattttttccattactgatgtgcttaaacctgtgtcatcttgcctgaagcttcttctcactgtacagcgcaaaaaatgattatggagatagttctctggtgccttccccatgaataaatgatgcatttgtcattgctgttttcctgaaatgtcaaaaatagacacagtgaaaggatctgtcacacagagttcagaaatttggtacaaaattctaggttgaaataaggacagatcttttcttttttaggcttcattatgtatttgttccgatttcaagcatagccagtgtggtcacctgggctgccacgggatacatatgttcctggatccctggagacttacttcctaggactcgatttgtcatagaccttcctaggaaactcgaggggacaagtcctatggctcccaactttagctttcacagagcttcacagatttttatcatttggctcttgtgtggagagaggcgtcctgtcaggaagtttttatactgagaagtgaggtgccctgcgactcagtcctttctcactagcgtctcatggttctcaatctgcagaagaggaactgttatcctctttcagagagcgtgtgatggacattttatatcttccatattctaagttacagaggacttacataaatgccatttaggaaaatacaggaattaatttcttggagtaagctgtctttccatgcgatcatttgcaatagcctgaacagtataggcagagagagagagagagacagacagacagagagagagagagagacagagagacagagagaaacagagagagagacagagacagagactgagacagagagagagagacagagactgagacagagagacagagagagagacagagactgagacagagagacagagagagagttaaaaacatattatatttcaaatatatgatttgaggaaaatggaattatataaccctgactggaagcccagggcaaggattcatttgggggacatacccatcaacgggacccttacaaaaaggctgagacggagcacgtgtggtctcatgggttagaaaaggaggaagttaaccttgggatagctttaaacacgccagaaaacaaaacatttgtcaggaatcttcaaaaccatgggcctttgtaatgtgtgaaattgaacttctgacccttcttacttcacggtgacttgttttccttgcaaattatgtggtgttgggcattttgatgtggggcaaacagaacggttgaattactatagggacgcactgttcttttggtaggtgacatgagattgtagagctgaaaccaccactaccaccaccaccaccaccaccaccaccacccatacacacacacacacacacacacacacacacacacacacaaagacatttgaaaattggtgagataaaaaccctagcactcctcatctgtgtataattccctccccgtcggctgctctgcacctgtggtaatgtttgtgcccccccaaaatggagcgggaagagcaaatagactctggcaacctcagaagaaatcagtgtcctattccccgagccaggggtaggggtgacctcatttcttctcctgcttggacactgatgtactcttcctggtgattcaaactgtgtgtttggtaacattgtttcaacttccagactctcgcttcttgccaagaggctccagcacctggttaatgatctctagggtaaatgactcgaacctggttgggactgctcaagtggaattgcataccctcctctggggacttcttccctgccagccgcctgcccacctgtgggaactgggcagagccagtcttctgtgctcgttcctgggtggtacaggcgaggtcgaactacaaatgccagagaagacagcagctacaagctgccctccagaggacccacaggtagctccaggaggagcggggtagtcctgagggccacaggctcccccagaggcggcagggtggtggcagatgatagtggtattaaatgattgtatgtccccatctgcatgtggtaactgcccaggtctcctgcaggcaccgtggctgccatctgttcttgttcatctttgattgacagtctcagtaaatggcagggctgtctcgatagcctttgtacttataggtcatggagaatgcacagcagtgtttccttctgacctaaggacagcaccggtgatcgctttatgctccacagggataccgagaataaggttaaagatagcgtttagagtaacaaataagacttttccccctttgtgatttttgaaagctatttattaagggtagcttgaggttgttttgtttttcagcctgcagtctgtcaggtgtgactggggagtgtgtttctcactggtctccgtggactgtggaagtactggtctcgctaaagaagcagaagggcagatatgaaatctggagacatttacataaagcatgtgcttcatgtgccctgtccagaggcatatgtcccttcttcctacctttaattgtgttttagagaatggggccagcagtaattgtgggtggccaaatgatccttgagctgtttggtcctctgcggcagggtgtgtacgggtccatcatgagccatctcagctctttctcaggccaagttctgcttcacacgggccaggttggccactagctgggactctgatgtttatcctagaagcacggggtagataggattaaatatgatctttttaacctgaattctttgttactagggaattatacaatgtatgtgttgcatgctttttcttttttaagcactaattcagctggatatagtggtgtctccctagagtcctcctatttgtggggtggaagcagaaatattaggagttcaaggtcattcttggctacaaagcaagttcaaaaccaacctgactacccgagacattgtctcaacacatcaaaatcaacaagaactagagagcatcataattcagtgcagccgaaggcaaaacattgatttcatacctttgttctttagtgactgtgttttatagataaactctggtttgtgtattctaataaagagcttcttgaattattttgttattttcagtgtggggggacatgcatgcatgacagttatgtgtgacaacacacatgtggaggccagaggacatccctagaagtcacctgtcccctttcatcttgtttgaatgagggtctcttgttcatcaatgtgtgcaccaggctagctgacccactagctactagggatccttctgtcccctcgttctgacgtgtaggagggctgagattcagtgtagtactcacctggctttatttcagtgtacggggccaaactccagtcctgtgcttgtgcgacaagtgctttactcaccgaccccatttcccaaccagtattaaaaactagtcttttcattcacattgaactctggtatgtaaacttatccgtggttgcttgcttaaagcggttctcaaatagtggcggttctgtcccgttcaccaacatgtagtagtttctgcagacttcctttagttgccacagtttaggggaaaagatgttggtgggaactgggtgggcacttgtgggttggggcttcttgctgttttcatttttgcatttgtgcaggaggcctctatcacgtacatccagcccagagtgtctggagtgctggggttaagagcctggctttaaagaatatgtctgggtggtctgttcataaggagtaaaacaggctctgtgtgtgtgtgtgtgtgtatgtgtgtgttggggggggggggcggctgggcatagttaataaagaaaaagagctgtcatcgatacagctttagggtaataaagtgtctttgacagggccaggaagatggctttggataaaggtacttgttgccaagcctaatggcctgggttccaccccacaacctcatgtagtagaaggagagaacttgctcccacaagtagtccattgacctccacatgcttgctgtgacaaccgtgggcccacaagcgaaagaaagaaggggggggggagggaggaaggaaggaaggaaggaaggaaaggaggaaggaaggaagagcaagcgagctgtggtagccacggccccacatatgcactagatagatagatagatagatagatagatagataaaagtaaaaagtttttaaaatgtctttccaattcaaattattggcaaagttccttattttaataaagcttgataattaataaaagtatagtaaataattacctgatatttttatgcatgtttgcatgtgtgcgcacgtgcattcgtgtatgtgtgtgatacttgggttgaaaatcaggaccttgcagcctcccactgagctacatgccctgccctgccttgacaatttcttgcaccagctgtttggagtggggcttcattggcacagagagaagcagcaagtgagagctctgactgtgggctctgcatctctagatggggcctgggcctcatctctcacactgtgagaatgtaaaaagcacacgtctgtggctgtcactgtgaggttgaggctgacgtgcaactctagaagcagactcagctcttagagctaattcagtctaacatgccccctttggggatgaaggagccagctccaaaaggttagctttccttttctaatcttctctgacgtgtgtttctctccctcctttcagttcttaaggcaacttcgcccgttaattaattcacttttcagttaatcgtgcactcatttctgacaccttttattgtcatgccgcctgctcttagaaatcttcaagattaaaatgttcacgcatgtgcttcttgactccttaattagattaaactggctctgcaaatgggataatggtggaggtacctttgtgtgcctgcctgtacccagagatgcatgtggtaaatttcagacccagagaagacatttgatgacctgatcagactgggtctgcctgagcaagtaggagaattagaaccaccattggtagtcgtccttcatgggaagactgacttgattctgacttgcctcctgcatgggtagctttccctgtatttgagagggccagcggtgcctgttactatcaatcaaggctgacttgtaaagaattgactctcgacaatgtttcatccaaaattctgttttcttttgacctaacccagctccttttttggtcacatgaatggcatatatgtgcaccggatgcacataaactactccagcccacttctggtagacatggcgattcccaaggtgtggctggtgttctggaataaacagccttgagcgggtgttcttctggcattctggtgggatttagtcacacaccctctcatcttggaaacaagtggtctctccagagctatactaagctccgcctacctctgtagagctacactatgttccaccccactctacccagcctcacagaagaggtagttctctgcttataaaacttggtccctgccccttgtttagaagactagagagggcttgcacatgcgacccagaaactgtctgattcctgtctcttgattctcccttcacacataccccactccattcctaccacagcaaatgtattctttctgttgtcttctaaccccctctgcctgctttggctaggtttgggtctagggaagtactggtcaaagtgcagaccatggcccagtagcagaacttgttagacagacagatgtcaggccctgcccctgacttgtgggttccaaggagcctcctataataagtgagtgtgaagaagccctgatctgatgctactttcaggagggaacacagcagtggttggtcgccaggaacaatgcaaacttttttttaaaacatatggattctcactttcctcccatgcatccatcctccagcctgctgtctgtgtactgcccagactttgcctggaaaggaccccttctctgaggggtcttttctagatagttctgtccaccggtgattcctgcttcatgcattcatctctgcttgtcttctctagccaccttggaagtcccatacttctctttactgtgtgcgtccccatagaatccacatctgtggttctggctttctttcccgaatgtgttctctgtagaatcacatctgtggttccagatccacagcttcaagcaatcagagactcagcagaaatccgaaaatatgtaagtgagaaaactgcatctatattgaacatgtctagaaccttcttccttgttaccctttcctcataactccagaatattattttccatatcactgatattgtatggagtataataagttctatagaaatggcagaagcttcacagaggaatttaacattaaatactgtggcatagcaggacatacaggctttgagcacctgcgtgtcctgaagccagcactccatgaacactaaagggacactgtagtctaattattgcctgtatacacatagaagcatgttagctccacagcctcgcctatggccaccatgaggtgagcactcgtgagcacaaacttattgataactgatattcttaggcttcggagtgtacttaaaagcttggttgtcaattattccttaagttatgcacaaacagacttgccagctaatgtgatgcaagtaatgaaatctttgtagtggtttgtaggatccagtattgttagtctctggattgcaatttcaggaggctagtcttggaaagtggcggcattctaagttgataagtgtgttccacacagtgagtgtaaggttttagtgtactgtcgtcctgtgttgataaacatatgcaaataagggaaaagaccactcttaatactgagaaacagatcatctttcccccatatgatatgctagctgcacccaaattagtaaatgctaaaatgactatggctgataaaaacattgcacaaagtctttttactttttatataattaaagtgagctctccacttgatcgtcatcactgagataaacccagtcttgccagactatctgggaagattaatgaatcagaccctaaaatcccataacattcgaaaaataactactgtgtactgtgacttattgaggatacaaagaagttcctgggctctaagatttacgtcaatcttgtcagcccggtgcaagcctccccttggagaagtcgactatgaaaagaccattgctttgagctacacggtgacctaagtgaagttcagctttcacaagttgcgaagtgtagctagatttatggcaggtctggccaccttgtctgcctgccctccactttccaggtgtgatttgtttcataatgtttattttgtttatggactttgcttaataagcaagttgtttatgtatgatgcaaaaggataagaaaaagtctcttgatgttctgatgctgatgttctatgggcgccttgacatctccacagggcggggttatcacctggtgatgccaaccaaatcatcgaccattcagacagacaaatgtgattcttgttgctttgatgagtgtttgtgtctacagtgacaggcagtggcataagagaattgcatgtatttgtgagctttggtcagtctttttttcaaattaggtgaaggtaagagtacacattctctaaggggtctttgtcttgactgaagggtgcagaggtcacatgtagaaagctgggaatccagaatgtaccatgcattgttataaaggagaagccatttggtgttttcagataaaaatggagcttcccagctctgaaactcagtagagtgcagtgagggataaaggagagactacaaacaaaacacaaggaaaaggggaaccctgcctcctaggggtggagtagaatgtaaatcagatgcaaatatccagtgggctaggaacaacttaggacaaggcttggactggggccccacagagatagctcatcatttaagagaatgcactgatcttaaagagggagtcaggcctcaggcccaggttcagcagcttgcaacctcttgttactgtggcttcatgggatctaacaccttctgattatctacactatcagacacgtaacagcaaagaatacctctctctctctctctctctctctctctctctgtgtgtgtgtgtgtgtgtgtgtgtgtgtgtgtgtctccccctctcccccccccccccgtctctctgtgtctctctctccctctctccctctcccccctttctctctgtctctctctctctctttgtgtctgtctgtctctctcctgtgtgtgtgtgtgtgtgtgtgtctctgtgtgtgttaaagaacatctaactagagctctaagatgtgttatgacattataggatcctctgtagaaacatatacctctttgccacgacaaggttatatgactgtttatcgcataggtctctaattcagtgaactaatgtggttttatgatcaccagcccaggtagtacctggacaattgtaggtcagtagaatcctgaacgatcaagcctgcataaaacactggcgatgagtcctggccacagctggctgaaaaaggaaggtaaatggagtcacctggcaaagatatttgccctttctcaacatgatagatgctatatttagaggaaatgtttgtggtgataatatttgaaagtttgttttgtaatcctagggagcttgggttgtttcaactggaggggtgtgggaagggagggaggggggagacaaagggacgggagtgtgtccaatgggagaggaaaatgagatgattaattggtacagaataagaatagaaagcacgtgggaagcagaatcttgaagtttcagggctctccgttagtcattagttgaagattttgctctaagagaactgatagaggcccacccacatccaaaaggaatttccagccttccctttagctgcaggtagaatgttctaaatatatcctgttctagcctgggttctttccttccttttcctgttccctttgctccggataagatcaactgcctgctctttgcctctgtggccattcctgtttccttcgctctgtgcccatgtcccaggatcctcttgtactggtccctctacaccagcagttctcagcctgtgggtcaccaccattggaaacacatttttccagtgtcttaggaattaggacactgctcagtagcaaaaatacagttatgaagtagcaatgaaataattttctggttgggggtcaccacaacacgaagaactgtatcatggtttacggcattaggaaggttgagaactactgctccacacgcccatgcaaggatgagtcttcttatacattcttacaccctttggggtacaagcatctatgagacggcttccttagttcctttctgtcctctctatgctcaggaccatctccctgtgagggtgctctgcacactgagtactggctgccctaagcatccaataggagcgtggctaaatgaaatctgtttgaagattacacaaagtctctcagtcagaagcaagcgttctcttaacttgtgtttacagagctgtttgtactgggctgctcattcctggcctcataaagaaacccttggaggacagccacactgcccatgaagtgcttagagatactatcttatagtttaagataggcgggagacgtaaatggagtccagtctttgtgtacgtacatggaggtgggatttgtttataatttgtttcacatgctagtgagatacattaaggcagtggttctcatccttcctaatgctgcgaccttttaattacaattcttcatgttgtgatgaccctcaaccatgaaattctttttgttgctacttcataactgtaatgttgccatgtatttgctatgtaaatatctgtgttttccagtggtcttaggcgacccctgtgaaagggtcattagatacctctaaatggatcatgacccactggtttagaatcactgcattaaggcatctgggatgtcaatcttgggaaaagccagccagtggattctaagaggcttgatgtcattgactccctgagtcctactccaccttctcagcatgtcaggactcgataggagcagtgctattgcccctctctacagtggtgttctggggactctatcaccctgaaacttgcctctgtattctggggtgtgcactagtatccacactctggccagccaccggggtctacaggttgcgtaaacagggtgcactgtagttgtttgccattcacttgaggtagagctctttcccaacaaagtgcattcagccggaaaggaagagattgtttcctcacaagttccggagaccctgaggaacactaagtggcggccaccagaagacttgctgttaccacagtgacatctttattactggcatttgctgggaaaagtgttcaggaacaaggcaagaactgtagaagatattccgttttctctggggttctggctttcattaggactggccagccactcggacattggtgcttgctttaactcctagataaattattagtgtgttaattgtcatgagtcagagcctctaaagtgtcttcccttaaagaggttgagccttcatctcaatctcttgtcgtagggtctaaaaatgggagcatgagtccaaaccctttccagatcataaactaattctgagttaatagagcgtaggcaagtgggattctatttgagtgttattttcagatgcctcgagccagattgggacctttagcacctcaaaagtccctgaagtgaggattaagagactagcagtcctgtggcttctggccttagatggccttctaagtaggtcagagcctcccacaccactctgggatgcatagacctcggtcccttcaacatccacttctgagactcgccgcaggaagctaagatgggctttcttctcatagagtgtgtgttggctgaacctgggagcacagtggcttccaaacaattgattcttctaattccggagttacccaaatgtgccctaaaggcttgtgccataagcttacatggtgacgcaagagcaggtccttgtccagaagtggtttaatctaggatttcaggtataagtgattggtttttggttttttgaatttttggttttgttttttttttaatggtgctggggactgaacccagggcactatggatgctagtagccaggcattataacgttgtgctatgtcctcagttccacaggctgcaattttaagaccaggcagaaatacgtacccactgcaggatttgctctggcggtagtttttcttctgtatttgttcctgttgttgttgttggtggtggtggtggtggtagtagtggtgggtatttatttatttatgacaggtatcactatttagccctggctaacctggaactagctatgtagaacaagttggctttgaactcagtattctgcctgcttttgactgtctattgctggaataaaaggcacacaccatcagcatatgctattttttttttagacttgtctgtgaacacaaccaccttttctagaatgtaacaggtaggctaatgctgattttgctgagatgtggcctgtgtgctggctagtttatgtctacttgacacaagctagagtcatcagagaggagggagccttaattgagaaagtgttgccttaagattgggctgtaacgcaagcctgtagggcacttacctaattactgattgctgaagctccagtggcctaatggataaggcattggcctcctaattagtgattgatgggggagggaccagaccattgtgggtagtgccatccgtgggctgatggtcctaggatctaaaagaaagcaagctgagtaagccatggggagcaagccagtaagcagcacccctccatggcctcgacatcagctcctgtttccaggttcctgccctgttttaagttcttgccctcactgcttttcttaatgaactgttatgtggaactgtgaatggaataaacccttttctctccgagttgcttttagtcacagcatttcatcacagtagtaactttaactaagcctacatccagactggaggcgacatctactactggcttgtttggagaatgccagctatgtgttcataccctgacttaattgcatggctcttaaaactttcatctgatataaaccatgtgtggtgtgtagacctgtaattccagccctcaggtggggcaggcaggagggtcaaaagttcaaggttctttggctacctagggatttttccagggtagcctgagctagagactcttaaaagttttgtttccctctgtggtagtttttcttcctgttctttggaaaacaaaaaacaagcaagcaagcaaacaaacaaacaaaccccataacattatataatatattgtctagactagggaaggtacctttagaattaaaggttgggggtacaaaatgatttggaggagagaagtttgtactgtaagaatttgaaagatagcatatctttcatagatagactataatacatagaatagaatagaatagaatagaatagaatagaatagaatacatagaatagaaaataggaaaagcaaaggacagagaaattaccagacgaaggtgaaagttaaaataggaacaaaacaaagccgggagagctaactaaactcagcagctggccagtggggaggacagcaggaagacagcaatccatacatagcaggggcccagaatggtgaccgagtggctgagcctggagaacagcattatggggaatggcagagctgctgcctccaggcactcagtgctttagaacactgtgactggttctgggaacccgagggcctcagcacattccttttgcactagaaataacagtgtaaacagtgccccctcccactgcgtgtacacacacacacacacacacacacacacacacacacgcctctctgcctggatgaattctgcacggaggaaagtacaagtctagtgtccttgtcaggcaggtgaggcccggcgtggattatgagcaacaagtactgtttcttattttccacaaagtcctttaaaacaaagtgagaaaggtgtgggggcatgggggggaggggggtcttgggatcctgagtttcaggtcagtcaagttctaaggcaagattctttctcagaaaaacaaacaaataaatagagttaggcaatagtaacgggaagagaaaggtttggacgtgtggtgggtgggtagtagcatttacaggaaagtgccgagcacagccctagccaacacacttaaaaacataaggctgattcattagcaaaacaccaatgaccaaaagggatccaagaagcagcagcctagagctggatagaccagtttctatagaagagacaagaagggcggctgagagcgagaggtcatgggaagagtcaggcaggcgggcggcctgggtttcctttattttcacttgtctgcttttagctggtgtagccaacctttaaggaacacaaagtttcagtgttacacatcctactggaccggaagacatagcgaggcacagaaaggctcccagttcacttagagaatgagcataattttaacctcaaatcttggtgctcctagggtggatggggagaggctcatgaagtcctaccttagctgaggagctgtttgtggttggtggctgctgggagtgggggcaggggaggggggcagagtcggttttcttcaaggatgctgtccctgaggggatacccattctccacccattctccagtagatggacctccaccgtacacatgtaaacagcgctagatgaatttggtaggctttatttatttatttatttattgtttttcgagacagggtttctctgtatagctctggctgtcctggaactcactttgtagaccaggctggcctctgcctcccgagtgctgggattaccagcaccacgcccggcaagcactggtaggctttatttaaaaaaaaaaaaaaatcacatgaacttgggagggaagagtggtggaggcgataagatggggggggggggataggcaatggatttttattaaaatgtattatgtgtttatgaaattgtcaaacaataaaataccaatacactttgaactatttttttaatggaactcaaaccaggtcctctgccagagcagttaagtggtaagctatcactgaagccccactgataacatttaagcaatgtagagtaatattatctatgcatgaagtttacaatagcttattaaccagtagatttttgggtaaggccaatacactgtagtcagtgtattacactgtacttgggagttaaaggacaggggactcttccagttgtcgtgggttgttgtacaaatgcgtcaagagatgtgtgcttgccaagacagcagaggccaccgactgcagagaacagagctggctgataaaggtcgtagatattaataatacaataaatctgaaaaaagcaaaccaggaggaagaaaaataacaaaggtgctcccatgtgcgggcgcgcgcacgtgtatttgtgtatgtgtgtgtgtgtgtgtgtgtgtgtatgtgtgtgtatttcacaacagcagatattcaaaagtcaaaactctcaaactgttttgattaaaattaggaatcaaccaagttcccgccccccttttacaatgatttaatattgtactgaaggcttgctgaaagggttgtgtgcctgtaactccaagatcctctaaggaagagcagtttctaaagcgagtaagaattgtcaagggggctaggtttaaaacacaaacaataaacattctaaagaaaatgtctgttctttcaaagacaaatgcatagaagtgtaaggcaaccattgatcttacttggggtttctattcacgaccagaaacaactcagtggggaaatggtttgttttctcttatagctctctggtcacccctcatcatggagggaagtcaggataggaattccaggcagaaacctggaggcaggaactgaagaagaagccatagagaaacagtgtaacagcttgcttagcctaccatctaggaccacgtggccaggtgttgcaccaccccagtgacctgaggcatcccacatcaatcatcaatcaagaaaatatgctttgcctccaggcaaatcttaaggaggcattttctcaatgaagaattcctcttcctagaagaccctagtttgtgtgacgttgacaattaattaattttttagcacaattgagcagttgtcaccttgacacacaaaagcttgacactgctaaaatgcccttcttgtttgtcccccagatctcatgttaatatcacaatataaagcctagtatgacttttaatgttccaccgtctgttttaaaagctcagtctccttcaaatatacaaaggctctttgaaaattcacagtttcttaagaaccagagtccctcagctgtaggttcctgcagaataaaacgagttacacgcattgaaccaaggaacgctcacaatttcaacaaagtaaaaccaacacccagcactctgtgttgaatcatagagtcgttgaccttctgtctgagactcattcaaaatcctctgggtggtctcgagcccggccattccttgacaggacacatagcttgtctcctaggttcaggccagctctactctacagctattgctatccttgttgctcatcccacagtcctggcatctccagaattctggtatctctgttgctacatggctgtcccttcaccaatagccttcctttgggctaccttcaggtactccgaccatgtcaaagcattccacgccccatcttctctgcatgactctttcaatcctgaggtatcaactgcgtctgaggctgcatccacaactcccctgatctctcacagtgccaatcttcagacgctctccctgtcttcaaaccaggaccgcctgagacactcatacacgttaccagtttcagctgcggacacaaggcacatccttggctctcgatagaccacagctcctggtcgctgaccccgagcaaccacttcttagatttcatctcaatgatgctggtctcttcttaatcgccactaatttcccagccccagtgactaagtctgattgtcctaacaaagcaaagaattcccatgagtggttctgtggttctgtggttctgggctcttcagagttgattcatcagtcccagctggccagaaccactgatcctgaattcgaatggtcccagtagtcttgaagggactctcaaaagtccctctgaagcctcacaagtcaggctccatcttctgcactgctctcaacagtcttctctttcaggctcttacacaacagcccattaagctctgctcactcggtagctgtaagagcccactcttctgagcacctccacagtccttcccacggtggtcacagcgttcacatcccacactcctggtgccttttctgtcttcattttctttctgtcagtgtgatatacaacatgacaaagcaacccgggagttttatagtttacaggtgtactccattaggaaaggcggtcaggacaggaacccaagggaggaccctggaggcaagaactcaagtagaagccagacaggaacaatgttcactggctagttcaacctgctttcatatactgtccaggaacaccacttgcccagggttggcgccaccacactgacctgggccctcctacattaaccattaaccaaggaaatacccccaacatatttgcctagaggcagtgtgataagatcttctttaaactgaggttctctcttctcagatgaccgtagcttatgtcacgttgaccaaaaataataataaaaaaataattaaaaaaaaacaatcagtataccattccaacatcattcttagtgaaaaatatgaaataaaacctgaagggatgaaactataaataaaacaatgaatgtagttaacgcaaaattcataagtaaatttatggagatccttttaggaattgcagagtgtttttttttaaattggataaaaacaatcctggtgtttctatcaaaggataaatgcataattctggggagaagccaaggtgaatgtgagggaaggaaatcaagtgagcacagaatgtgagggaaggaaatcaagtgagcacagaatgtgagggaaggatgctgagaaaggttttcatggtcaaagccacgtgggatagattcaaggtccaaagaattcggtggaaccaaacagagagtgcgtggctgtctcactgggcaagggatagatggatgcacagcgttgagaaaagcatgttgctatccggtggacagagcaggctccatcatctcttcatctggagcgggggtggcaggaaggacgcagggatgattctgtcagtgtgatctgacaagccccagaatcttctgacccctagccgcatacagacagtttttaggaggcaaatgtaagaaactgtaaaatcgtgctgtgtgggaggacttgggcaaaatttaatgcgggtaagacagtggggcatatgttaagggaaaacccttgtgtagtagaagatacatgatttaagtagagagagtagtaatggtctcccatccaagtgctaaccaggcccgaccctgcttagcttccgatcagatgagattgtaccagtaacttagaaatggataagaacagcatattcaaaggaaaggtgagtaaggaatctattaataaacatgagccgagtgtggtggtatgcacttataatcccaggctggaagactgcaggttggctgaggaacaagactgactcaaaataaaacaaaatgtgtaagccacagagaatagatgcagacaaccggcaaacctatttaaaaaaaaaaaaaaaaaaagttcctcttgctgggaagtacagagtaaaatgaggcactgcttgaaacccatctgactggaaaccgtagcaaagtagatattgccatgatgctaattgtatgagtgcaaccaaaagcctagcagtcatttctattatcacatttatatatttaaggaggggagtgtatgtgcatgtgtgtatacatgcatgcccacctgtgtgtgtacagcttgtgagagttggttctcaacttcagcgtgtaactgtgtttcacactctggttatcagccttggtggaaagcccctttacccaaagaaccatcttactgttcctgacaaacagtttgagtggttcatgatttcagatgcttcagtccatgggtagctgtctccatcacctggggccttaagcaactctgaaccttgaggaagaaggaggaggctgctcacctcatgatggaaggcagtagagccatgccataccctttctttcccttttgctctgtctggggcccagcccacattatgcctccattggcagcacacccctccccggccttggttgatacactaaaaatgtattcacatggaatttcagctctgcttgtgtaacctcccaggtgtcccccagtgaccaaggttaaccatcacaatgtggtaagacacctggctctgttgcaaagcagaccacagcgtctattacaataaaattcactgatttctcagcagctttcatccccgtgtcttttagaagttgcacacacagtgctatgtatagatagatctactttgccgttttagtagcacaatcctgacgataagaacggctatcggttgaaaatggccagcttatggaaatttcatgttctgtaactcgtcctcttgaagaattagcatagttctgggtcagattggctttgatctcatgagtccaagcatggggaagagctgggaatgttcctggtctgagccggggtgtggagcagaggctgatgcacatggcaagggacaggacagcaggattgccaaacctctcctccctgccagactaacagctgagctgctgctaccgggctggcttgcctgtcaaccgcatccacggcttccctgcggaggaagctgtagaggcctgcggtttgaggttagaaatcctggctcctttctcttagaccgtgggttctttttttcttattccagcatgctcttgagttgatctcctgatatcccccctggattttctgagcatcttaattaaatgtctctctctctctctctctctctctctctctctctccctgtctatgtgttgctttccagcatgtgaaatggcttgtgtgtttttcaaaatcccgttaatgtagcttaggatgctatcttacatctgccctatcttgaaaacccccatggggtttattggtgtagctgtggtttctgaaaaaaaaaaaaattactagtcttgaatcttggatcaaacctgaaggttcccagagtcagactaggcatacagttagttggtaaagtgcttgcagtagccatagtcccctccccaccctcgtgaaaacaaaggtgggactcctaatgtgcacctgtaattctggttccggtgaggtggaggcaggaggaaccctgggacccactgaccagcctagccttcctagtgaacatcaggccagcaagagaacgtgtgccaaaggagcagatgtatgacatttgaggaacagtggccaagggaatacatgtacacatgggtcacccccccacacctccacccctctccacccctcccnnnnnnnnnnnnnnnnnnnnccccagttaaaagagcaagcttaggtacttgagactcaagggcttctgccttttagtccactttggtcaagaacgcatgatgaggttcaaggtgatgagagcatttttagcgcaaaccaggaagcagaaaaggcaggatggagtgaaaggagatctatccttcagagcctggcctggtgacacgctccccaaagctgccaggcttccacatagcacaaccctgggaagttgcacactagctcctactggctgcagctggtgctgagaacagcatctctcctgtgcttgtattaccctgatttgtcactcctttgccagcctggatgggaaacccatcacttttatgtctttaattagttgaagtgtccagtactcttagtgctttcttatttcctttctataaagtacttgcttgtagctttttgtcccttcccgtctggttggttgttaattttttattggttttttggaccacttctttatgcaagcttgtctcacacccaatgtattgtatatatcattatgtagatgtttaacattgtgcttttcagtatatcccttcagtagagccttggaacattaacgattatagcattatttgttcttgttaaagataaaacggggttttcccctctcaatggaaaaattacagacgtttctaagtctaaacacaaagaaggaaaagattatcaactacagcatcattgcatacctgagcagcttctctctgtttaccttttgggaggaaatgtgggcttttctgattgcccttgtaacattgtaacttactccaccaagtgatacataatgacattcggttttctgggtgttcctcatcttattttatcatgtctgctggaaggttctagttttgtttttgttcatgttttaagaaagtggggaaagatgtgaatgtctttgggcaaacccaaaaggttttaaactggattttgtttttgtgttttgttttttgtttttttttttttcctcttggaaatgggatgactaactaaaaagaattttgagatctaaacacgtttcctatttatgttcctgtcagcataaagagtcattggacttcctttaaaaatgaggcactttcaggagacacattcagaaagaggcaggtctcaaaatgaacttgaaaggtttaagtgggagaaaggccagtgggagagtcctcagagtgaggtttagggagcaggcaggagccagggcccctcagggcggtgtggactattagaaagaatttgtagttttatggttgagagtctccctgttgccagaaatgggtgtggtttgctatcttttattgttgcaggtgagagtggcccctggctagttaggaggctgttgcattagcctagggcgggtgatgatgtcttcaacaccagagtagtggtggcttcaggtgtggaaaggagagagatgggggctcactgggactgtagagccctttcagctgatgggctggatgtgtaagtgaaagacaagaaaagagtgtgacagccccttaggtgggggtttggaggtgggggtggggtgcaggggataggcggcagaacctaagatctattgaagttctttgctccttagacttccaagtacaagcaagctgagagcctggccagtgtcgaggggacatcatggtgtttgtccatgtgttcggggttctagctaactgtccttgaaaactcaaaatcaggaacatagtcatttcccaaacgggaacatatctgtaagctgccaaaggtttcggggatacagatttggaggccatacgctttggacagagcagtgtacagccttgtacattgaatggtatttggagaatccagggtccttttcctcctctcggtaaaaccataaccttcttttgatattttcataagtgcctaagaacacgatcatgggaacctgcgaaggatgtggttacacatatatcctcttttatagttaggcattggagcagtaagctaaaccaagacaggagagtcttattggaaggcctttgtgaagaaattgaagacccggggtggcaaagctattccggtgttacataaagagttgggcctgcacaagtcatccttgttctgcttcttcctcccccagccagtgtcccagtttctcttcttctcctgtagctgattctgagcaagacagaaacttgggcttttgcattaagcatccgagttctctctccccgggggattactcatccttcacgaagtgacagtacagtcatgtcgccatttttaaataccttttattaaccatagcagatacaatgtgaagataaaaggcaagcctatagatcccacacatcctataaatccacgcagcccgaaagagagaattaattggtcgccaccttgttacctttccttccagccctttggctgtgtttgtaattagatatatagtgacagtttgtgagtttgacataaacagtagtttatggtaaacatttcatgatagcttatgtttttaataattcttagagactacatattataggttaaatcatggaggctttttagggaaaaaattcctgaaggtttcactagttggcagatccttttaagattagaaggaaaataaaaacaccaaacctgaactatctttggtatactaagaaattcaaattttatgttcttaagatcttgttttgactcatgtcactcttaactattcatattcctttaggatatgctaactaaactttaattatcttttaaatatactttttccatggttcaagagatagacttagtgttgtgagcttcaggaggcttcagaaagaccacaccaggccaaacagttccacatgaggtttattgagggggggggggcaaggtggtggcagaaagagaggtggggggggcaagagagagagagatatcagaggggcctttatatatggatggtgaggtggtcgcaggtaaaggtgggaggtgagccaagtggattctgggaatatggtggctattgccttggcaacaggtgtgcatgtagcacctatgtgatgtcacaggtttcggaggtcctgatgccaatacttagagtttaagagcacttgctgttgcagaggacccgggttcagttcccagaagccacaccagcacatctgatggcttctcactgactacacctccggttccagaggatcccatctcttctggtcctcatgggcatctacatggtgcacacatgcgatacttataaaatagataaatcatgaatatacaccttacatttcaagggtgtgtgtgtgattgtaaggtatatgtgtgtgtgtgtctggataacagtttgcctcttaacattaagatagaaggtactgggctggactcatttcatgaaataccaacgagtctgtcttgcaagcatgagaacctcgtccatagaatccacatttagcaagtggtttgactaataatgtttctaagacctagcttataaacaacccagttgtctaagaataataaacagtactgagcaggtggtttggtatacatcaggagtgcccacgagtcatccaaagctgcacatttaatcgcagataatacagataggtgggaacatcatcatttaaaaatgtgcactcctgaggattgaacactgggccaagtacattctaggcaagccctttacctccttttcgttccctctcctcctcctccactttgtatatgtgaaaagaatctcagttccctaggctagtgttccggtccctctgcatcccaggcagggctttaatttatgatcctattgcttcatcttccacaatgcctgggaatagctctctgcgttttactgttataccatagccaggcagcgtccgtgtgacttttaaataatactttgaaatgtcatctggaaaagaactgtctccaagaagtaggcaggaaggaaggcttctggctggcccttccgtggcattcccaggtgtccttcctggggcctctccttggtcagagaagactctgggccatgccgggaaggattgctgattcttttcctccaggtgctgactgcgggctgcccgtattgtgaaactgaggcagcatcagtctgaagacatcagctccttcctgtttatcaggtctggagtccttgcttttctcagcctggcatgtgcctcttcagcttccactggggagatgcctccatcatactccttggattcgtccctatccacagctatcctctgattccttctcccatggttccaaggccaccaccaccacattctgctctaggtcctgtcccttcaagaagtggctttatctggagccacagttgcctcccgggtatactgcacagtatctgtagctgtcctccattctcatgcctatgaagacctgctacctagggggcagtggcagagatacagataaacatcctacagtgcacaagccgtgccctaccaaagccaaccaagactgacacagccccaatatccaggctaaaaggctaagctaaactattttaggcaggctctctggcctgctgtgcccccttggttatctgaggtcttgttcacgtcatctttcactgtagtcttaagtaggggcactgtaaatttggggaaacaaaacatgggagatcaagctagtaggaatatggctatcactcttgtgtatagcaaaattgggctctagtttcttactataggcaaaaagaattgggtatagacttctggccactactaattaaaaacttttttaaaaatgtcttatagctgggcatggtggcgcacgcctttaatcccagcacttgggaggcagaggcaggcggatttctgagttcaaggccagcctggtctacaaagtgagttccaggacaaccagggctacacagataaaccctgtctcgaaaaaccaaaattaaaaaaaaaaaaagtcttaatttaattctgagattgttaatgactgcattgaagaataaactggtttctatggactccaaagaaggattcagttgacctgggaaccatgtttgactgaagtggaggggaacatttaatggagaaaggtcttgcccttttcagagtgaggttattctgcccagctttccagatggatcctggagtgaatgaagtgcaatggtgtgagccaggagtccacgtggatggcattttcatcctaatacatagcacgagttgtcacttacctaacatttgccagaacagagtcccacaggctgattggcttcagtatcacacacatttcccttcttagttctgcaggcctagaggttattaattaattaattaattaattaattaattaattaattttagaggtcttaaagtcaaggtgtttgaaatcagggttggttatttctctctctctcctccttagatggcaaaggccatcttcttccagccttcccactgcctgtgtgtgtnnnnnnnnnnnnnnnnnnnnnnnnnnnnnnnnnnnnnnnnnnnnnnnnnnnnnnnnnnnnnnnnnnnnnnnnnnnnnnnnnnnnnnnnnnnnnnnnnnnnnnnnnnnnnnnnnnnnnnnnnnnnnnnnnnnnnnnnnnnnnnnnnnnnnnnnnnnnnnnnnnnnnnnnnnnnnnnnnnnnnnnnnnnnnnnnnnnnnnnnnnnnnnnnnnnnnnnnnnnnnnnnnnnnnnnnnnnnnnnnnnnnnnnnnnnnnnnnnnnnnnnnnnnnnnnnnnnnnnnnnnnnnnnnnnnnnnnnnnnnnnnnnnnnnnnnnnnnnnnnnnnnnnnnnnnnnnnnnnnnnnnnnnnnnnnnnnnnnnnnnnnnnnnnnnnnnnnnnnnnnnnnnnnnnnnnnnnnnnnnnnnnnnnnnnnnnnnnnnnnnnnnnnnnnnnnnnnnnnnnnnnnnnnnnnnnnnnnnnnnnnnnnnnnnnnnnnnnnnnnnnnnnnnnnnnnnnnnnnnnnnnnnnnnnnnnnnnnnnnnnnnnnnnnnnnnnnnnnnnnnnnnnnnnnnnnnnnnnnnnnnnnnnnnnnnnnnnnnnnnnnnnnnnnnnnnnnnnnnnnnnnnnnnnnnnnnnnnnnnnnnnnnnnnnnnnnnnnnnnnnnnnnnnnnnnnnnnnnnnnnnnnnnnnnnnnnnnnnnnnnnnnnnnnnnnnnnnnnnnnnnnnnnnnnnnnnnnnnnnnnnnnnnnnnnnnnnnnnnnnnnnnnnnnnnnnnnnnnnnnnnnnnnnnnnnnnnnnnnnnnnnnnnnnnnnnnnnnnnnnnnnnnnnnnnnnnnnnnnnnnnnnnnnnnnnnnnnnnnnnnnnnnnnnnnnnnnnnnnnnnnnnnnnnnnnnnnnnnnnnnnnnnnnnnnnnnnnnnnnnnnnnnnnnnnnnnnnnnnnnnncacacacacacacatgttcagatgcatacacatttgtatggaggccagagaacatcctccagggtcatttctccagcactgtccaccttgacttttgagtcaggttctctcactgaccaggtaatctggctgtttcaacttcctcggtgaagggattacagatagacattaccatgcatatatgtatatatatgtatatatatattctgaaggatggagctgaggtcttcctacttgcaaggctaacactttggcatttcatgaaatgactccagcccagtgctttctatgtttatgttgaagaggtaaaccacccctccgcccaacacacatacacacacctacacccctaccttacacatctttttaggcgtgtttgctcacggggatttgtgattcctctgtggcttctttagcttgtgtctccaggctcctgccttgagcttctgcttgcgtccctccgtggcagacgatgagcaggaagtgtaagggaagtagacccgtccatccaaccacaagttgctttggttggtctctgttttatcacaacacacagcaagccaaggacaggtggtgatcaggctgcccaaactgagtcatgtacacagagggcaaggcagtgagcttcaggctctgggccccttgagggaagggggactgggattgtgggtgtgtagtcagaactcacctttcctgaaatacccagtctcacctgctgtttcttttcagtgcactagtcataggatggttatttttgtagctgctttaagctctctgagagccaggaagttgtgatttccaagctgtttggtatagggctcagctaaaaggacagaacaaaagctgtgacctgtggatgaagtgcccagagaaccagtgctctaagcaagccagacagaccagagattatgtgacctgtgctcgcatcccatacaaggttcaacaaccttagaggactgtcactcggagagaagatactgtaaaaacaagcacaggtaacttgactgtagggcactgggtaagaggatttcagctaattgctgagctgggtggagataatctagccttagctagggactgggtggagcttggcttgagtccctgttcccaccaagaagcattctggtcgagctgttgctgaagtgactcatcagcctaagcagctagcttctgggaggctttctcagatgtgttaaaacttgctggtgttcagagtgcctccagaggtgcgtggtgcatacactactttggagcaaggaaggcagaagaccagacagggtgccctagggttgcccaggtagacttctatcaacaccagtccaacagcacacatgccttgtttgtcttgattctcgaggacaaccacaggtaagaacaaaggcaccactgtaagttcgttgtgtgggtgtacggcatccactggcacagagcatgatttttgtcgtaataccgttttcctatcggtgatgttaccctaacacgtaccaagagttcccattgtaaatgtctttgagggttatggagagctagtgggatttttcctcatgtgtaaaagggttggcagacaaacgtaacggcggctatgacacgaaccctggtctgtttttgctttcttttctgtcttgacggtttagaaaaatgtatagtgttcatctcctaaaggaacacagggactgggtgtctttatatcttggtgtcttttatatctaatgaagagggtcacagattaaatcctgtgaatatcgttctctgatttagaagttgttgttttgggcagaacactcacaacccttcctgtcatgtgttgaatccctattcctgtgacgtcaaactggagaagagggtagtaccagccgtccttggcttccagtgaaattccatcttaggtcatgtagtggtttacttgggagactcgtagtttacattcagatccttagatggcagtcttagaagtcttacttccgtcaggacttggcttatgtaacttagtgtaagttactgaatttataaaaataaaatttttgagagaatcacagtgataggccagagcacattcaactgaattattctttcgtgtttagttgtcattcctcatgtgtgttactcatgcatgcaaatcctcggtgtgattaacatgtgatatttgtttctttaccgtcccatttggtgattcataaactgttagtttagtagtgtatctgtaagcctggaatacatgagtgtgggccacgccttctgttaatgagcctggttactttccatgggtattctgatagtgttgtgttaagacagctaggaggattaaaggatgtggatggatccaaaatgggacgtgttaaaagctatagtcaggacaccactttatttcacattgaaatgtacgttgtctatatgcatttgaagtaatttctggctaaggtgagcggagtaataactgaacttatataaagaaaagggaaataagcactgtcagagatgtgtggaggacatgattgcccaggcaaagctgaatccagtgactgtggtatcaggagatgagggaaagagggtttctagttaattagacaagagagaagagacaggagctgcagtggcggcggaggtggcagctttctcatgtgttttcacggcccctgttttcaggaaaaattggcttttctactcaagaagactttgtggagtcagtcttgcaactcaatgtggattttaaaaccacacatttgttcagaatgctgggttgttggtgttgggaactgttcaagaggagcggatgcaaggcaggagttccataaacccttaagaagtatggataccatagcccagaagggctgttggctggcctgagatgctggcattcctggtgcatggaaggggacttccttgctcataggtggtgtttgggggtagaggactggcttggttttctctatttcattccaggtgtttttcagttttttgtgtgggtattttgttttgttttgtttttcattagtctaaacctgctagggattttccaaagtagttttcaaggtcaggtatttacgtagggtggcagagatctttcccctggagttggctgctgctgacgtcattttgtacttatgcagagggctcacttacaggtgggccacctagcatccaggtttctgaggtcactcaccttggagccacagcaagagcacgtgttctcagccctgtgggtttttttttcccccagaatatattgggactgtgtccctccctggtagctcagaattccacagagggccacttggcatgccctcacctcagtaaatatttgtgtttcacttgttcctgacctatttggattatgaggggcacagagggagcacggatggacagtggacagtcaggtccccagagctgtaccatcccccaggccagtggttcttaaccttcccaatgccgcaaccctctagtacagtttagtttctcgatttggtgaactccagccatattattatttttgttgctacttcataactataatttggctaccattacaaattgcaatataagtatgtgatatgcagggttatctgctaagtgaccaccaaaggggtcacggcccacaggttaagaaaggctgcctaggcacaaatgaagatccccaccagcagtcttgaaatccaaggagattgttaaccacctttcttgaaaccctggcatcacccttcttcctccccgaagtgggcagtggttcccagaagtgaatccacccaactaactgtgggacatagtcaggtaatcacagactacctgcttccatctgagacacaggtcagctgctccgttcacctcagttactggaagaaggttcagagtctagctgctgattgacatccctcagccccgcccccatctgtccctgcctctgaaaacaaaggattgattttccttctagaaaatggaaaagagtgtggacaattctggaaaaccacatgatatgctccccacatcccaccccaccccaccccaccccacccccaaccaatccctggcagtgaagaatgggatttcagaccaagtgaaaatacagacctggcagattcaagtatgatcactggccagcactcactacctaacacagcccactttcagtgatgtaagctgtcttactcaccagctcttactcatgtggcctgctgcaggcagagagaatcacatgcgattataaacagcctcttctgaccctggtcagtgactacaaaccttgtcacagaattggaaggcttgtgatcgggaattcctgggcagaggcctttcagaatcccggggacatatctttgggacctttgccagtgtagaggtttgaaatactccactctattatcaggatgtaagcttcagagtcaaggaagcctggcattgtaagggctttgtcaagtgtgacaggcctctagagtttacctctattctacgttctaccctgttttgttgaggttttcaatagaatgagatctgaggtcaaaggagtgaatgttttacctgagatagatttgttctgtctagtattgtatttaagtaactaactcactgaatacatagtttaagcacttgccttgctcattgcttaaaaataatttctttattattcctgcacttcagaatgaatggtaactatcactttagctattgaggaatgtatctcttacacttgtcagttttttgttggactaatattcttttaaattatattctattttttttaacttggtttattttatgtattagtggtgctacagcagtggacagagtgaaggtatttctcaaagacttcatttgtaagcctaatcagatggctggtaaagtaggtggcctgcttttggtagctggtctcaatgaattaggttgcttcttgattccttgttggtgggaaatcctgcaggccaggccgagtaattctgttcctgggtatgtcaggggagcctccttctacaaaagaaaagaatggtgacaggagctggtgaggacgagtatctaagacatacagagaaacgggcaggagagaagaagacacgagtcaaggccctgtcacctcctgttggaggtgagactccccagagaggatgcattcatttcttcttaggaaaagcgccataaaaacttaatgctgcctgtgactcggggttagatgattggatggtaaagctccatagctttgcccagttatggaaaggaatcgcagaagctcacagcaagaccgagctgaagagcggtggcacacggtgcagcccacagccgctgctctagcatcctcttcttctgcctgctccacggcctcctggagttgcctaatcctgggtcctccctgggtgataattaagttgttggcttgttgtgtttatacggatctatatttagctctgcttatctatgtttggggaaggaggactcggagaacaaaatcaaaagcatccccctgagttcctaatggagaaggcaccagctgagagtgtcagcggcttgcttccaggctgtaaggtgaaactcactcatttctccaacccatatgtactgagtcctctggggttcactcccagcacaggtgttggagaggccacgagctcattagggcctgagccagggacttgcctctctacctgcagggaactttcagcctgctgggcctgactaaccataatactcgagtccacagatcatatacttatgatggggttaagagccataaagagaagcagtctaggaagggaatggcaattacacatgtgggtgtgcttctctaagtggttggggtttcttctgtctggtagctcctcctgttacccagtccagctggtcacgattagaatgtaagtgggggctgacactaggtttgtggtcggaagcctgctttttaacaaatctctaaaaggatcgctcccagggaaagctgtaagatagtcttcctggagagtgaatggcattgatcttagagcagaataaaaagatgtttactgggaaagcaaattctccatccatcccagaggatactcaagaatcatnnnnnnnnnnnnnnnnnnnnnnnnnnnnnnnnnnnnnnnnnnnnnnnnnnnnnnnnnnnnnnnnnnnnnnnnnnnnnnnnnnnnnnnnnnnnnnnnnnnntagataagaggagagacagccagaagcatgtggaagggtccagactgaacaaggccatgagaggagggggaggggcagcaagcaagaagatgagaagagagaggcaagagtggggaccaggatccaagaggggaggatcaagagagcctgtggccagaatatatgggaaagagaagctgagggaagagaagggaggggaggggaggggagggaagagaagtccctgaactaagagaggtttagggtaggggttgcgtgggaatgagaagaacagagcggagccacaggtgcccactgagtcttagatgggcaccacagttagccatttgtcctaagtttcttttgggacctggcacagaggactctggatctcttcgtttatgaagttgtgttagatgaggtgacctcagagccccggttttccccttagggttagtatccattgccacagctactgagtctagcctggtaacttgtcactctccacctaaaggataaatgctaggagagaagcaagtgggagtccacaaggagagactcagctctgtcctctcctgaactaatgcattcacacacacacacacacacacacacacacacacacacacacacacccgctggaaataaataaaggaagcttttctcatctctttaagagagcagtgaccgtcatctcaatctaagcatcaacaagctggcagctcctcaaagctggcggctttatggggctggagtgagagtcgaacctgcacacacacacacacacacacacacacacacacacacatcccagcccatagatagcgcgccactgttagtgaaatgaagatggtgatgtttggctatttgagtcataagtggcatagttgagtgtaaacctggccatctcttacttactccagtgggcgtagttgtctttgcctcgctgtgtcactccaagtcatggaaaccaagccagccactgaaggggaatggggaaaggcctgcctgtctctgtgaaacagataactcttggtgatccatggtacactcccttcaaggtactcctcatagaaactgcacagtcccagaaagtttctcccaacggcctgcatcccccttcacatgggactcctcccttctctacttctggtaatcatcttgtaacctgtgtacatcgattattctgccttgtttgccatctcttaattgccccttcctgctgggataaaagctccagtaggtagggagtttcctctgtcttcttccaaggggttctggacaattgacacattgcaggtctccatgaataatgaagggagggaaggagaaagctgggctccaagagctgtcctgtgagtagccacaaggacttgatttgatcctgaggtgagcttgctaggacttgtggtttcctatgacttgtcaatgctgcactgacggtgagctgtctataggtcacctcagctccaccttactgcgtgaatacaatggcattgcctgggtggctcattagtgcttagagggcaaagttaattgcccgtctctccagtttgcttttctacgggttgtagtttgaccctagccatcgtgacaggaggaggtctgtctacagcagtgacttggtgacactcctgatagctaattctcagtacagccactgatttgttcactgtgggtctcctgcctaatggccaggactggcttatggtgttcaacgtgccgcagttgcacattctgctgtggttttatttagctttaatcccttattaattactctttaagggtggattagctttcacttacaacctctggtccatggctattagacttctttgttttaggcacggcatcggaaaaacaaccaaagaaacctccagtgaatgcatttgtgtggctggcaatccaatttaattttacctttaaaacattgcaccccagaatatgaatctatagggtccaggatacaaatagggagtctgtacctctctatctctccctccctccctccacacacacctttatcccctattttctaaaatgcctaatgtgtggtaagaaccagtaccctaccctctaaggagtatattgttgtgggctctctgtgtgactggaatacgatatatgcaaatgaccaagacatgcccatgtttgcagagagctcctggaacaacagcagaaatggagaaagagtaaatgggtgctatactgatggatatgggcatggtgtcttcaagggcgtatgcagacacggtaggggaaggcatatctagcagagagtgaaacgtggtatgctgagaacagataggagcgaaacacacgaaagatgatgtcgaaaggcaggactgccagagccgagcaaatggggcagcaggcagttctagagctgggcagacttggttgccacgtggttggtctttctgttttaggtttcaaagtgccagtgaatggaatgagcccagcatgcttaacttaaagatgagtgtcggcaatcagccttatttaaccaggtgtagaagaggttggggtttgaggcttgtcttacgtggggtctatactgtcctgataaaacaccacgcccaaaatagctctagaaggacaggctttctctcatcctgcaccttgtagtttatcatgaatgacaagtcagggaactgatgcagaggtcacaaaggatgcttactggctttcttacagttcccgggaccaccagcctagggctggcaccactcacagtggacgggactctcacatatcaatcacaaaccaaggaattgtcccacaaggcttgtccatggggcagtctggtaggaacattgcttccaataaggtttcctctccccaaatactccaacttgtgccaagttaacaaaaactcagtgggaaaaacttctatccttcagggatttaatctatggggtggctaggagggcccatctgtatgccccaagagcctgattagactcaatggttaatgatcttggaggaagagatatacttcagggttcaagtgagagtagccagagagacctgcagagtggagagaggcagatgacgaagcctagggaacagtgacattgaacttgaaggtttgtaagtctgagttctttcctatcccctttttatggagaaaagtctggcacctagcccagcctcgatgaccttgaatttctggccctcctgcttccacctctgggtgctgagattacaggcatgcaccaccacaccctgttttaaggtcttagttcttgacaagagtctgtgtactcttgcatgcctgcctacattctttcgcaagacagttgtattcagattgtctttggagactcttcatactcaccagtaggaccgctggcttcaggcatctcactccaggaccagagagtatcttttgatcagattcctgagtgatttctatgtacagttcagtactggtggaaccccattcctccaatgtggaacatctgtactgatcatagaaaagaggaggtcttttcttcctgttgtatggtctccataggacctacttaactttcagaatctcctccaaatgatagactatggcatatggagtgtgagtctaagtagggattaattggtattttgctacagtatatagtcttccctttacaaagaccatttcttacatggccttgggatgctcactcaaaggagacccagttcacggccttgggatttgttattgatggatgatgtaggacagctgccaggtgtcgtccttcttgacagagaggagcaggagcatcacctgcagcattccagcatgctgtttgttctcaaatgatgatgtaggaagagaggacatacctctggcaatgctggccactcccccatatgacacagatatgatagaagtgttgttggtgtggcagtattgtattccgtgtgggctcagcagacattggaggttcgtttgttcgcctttactgagagctctgcaagagttcattttgtgtatgagcatgcacattggactgaaaagggaatggaaaacaacctgcaaggcacctctgagaacatcagcccccagatgaagaagtctgttctgtaaaccgggagctggagactgttgctcgttgtgtgagctctttctctacttataaaatgacaaccaatcctctaatcctggtttctggaatgaactgtcattttgtccatctgtgccctgcccctaccccactcccaatgaggccaccaataatagtgcttccccaagactttactttttcgtgtctggtcatatcagtgagtttcactgtgaagcttccccccccccccccagtgcctgcatgagtgcatgcattttgtcttataccctatgatactctaataaccccgagatcccacatgttaaaaaaaaaagcataagatatgaagcaagttaaagatagtgagatttgtatggaaaatcaattctgtccttagttatgcatgacagataggagataaaaattgctgaaaattccacattttagcaacttaggcaagttgtgatttttctaaatgtaataaaactctgagaagccaccttcctcataacgtttggcaagaagtcagccatctacagatcacacattggggacccattttctacagggttccgtgaaatattcaggagcctcagatctaaatggtggccttagtttgagagaatgaagatttaggaccttggaaaggaacacacaatgtgcaaaggcacttgagctgtgggaaggagggggctcagcaggtataactacaggaatgcggagaatggagatgcaggttattgtgggtggtttgtatggaagagatcctggctgcatgaagcgtaggcagcggatagctgtagaggtaaggagagaaagccccagaaagcatctgaacgaatgacaaggtgcagtggggccgaatgcttggagaatgttacgctgacatcatcagagagtaaaggcagatgtggctgtgggcaaatggaccaggctggatacgccacttcctgtcaactagaaagaatgaagcatgcagcaaaaggaaaagaaggagcccccacgttctggttgccaaatatagtagaagtttgatgtcagctattatgggagagaagtacaagttgttccccttaaactcctgacttttactgtgcttgtatcccatggttgaactctttcttcttgagggttccatgggcagggaaaagtagattatccatacaactaagtcctctatccagtaggggaaatttgcagtggtcaagcatccatgttaatgagacagactatgaatgagaatacagtaccctcttgatgactatgtagtctacactaggtcctggagcggtctttcaacatctaatatggtcatttaagggaagatctttttttttgggaaaaaaaaaaaatctgaatacctctcagatttctatgagatttaagaagccaaagccaagacccaactatccttcagacacagagaacaatccccagggtgcttggtagatttggcaagggatgatgctgttggtactggtgtgggttaaccagcttttagtgcaaaaagtgctgcgttctgtgagcttctttcttgatagtatatgggcccggaagttaaacgtaggcacctactacatattgaccgcctaagtgggaccgtctatctgaatagctatccctttagacctgggagtgggagtattagaatctagcccttttcctgtccattgtaatgcagttgttgtttccctctctccaattctgtttggagtttgccacagcactcaagatttggtagtttgcttgcctgctaacatgcttgaagatgaaactaccaaaaaaaaaaaaaaaaaaaaaaacctttcaaatggtgtctctgagccttgagggactgcttttaaccctttggaacattagggtttcataggtgatcttgtggttgtgatctcttagacacattcagtgtctctccagggccccacaggttcgttccggttctcatgcccttatgtgcacttccgaaggccataaagtcctgaagactaaaaacatttccgttgctgtgttggaaactttcgagagcaaaagtcagcaaacagtcaccagcttgcatttctatgtaatgaagctgcagagatcatgtttgtctgtggtccctgccccagcctccactggagatgttctgtgataacagagccaaaaggagcaaaaggcattctgtatttatttgtccctctcggcttcccgtaaaggctaactttaagggattctattctgctaagactgctgtcacaaagcatcagggctgggtgcctacccaaagacacttagtgcctgactgtcctggaagccacctgtcaggagatatgtgcaggactctgtcatgactccttccttgctttctgactgaggtgacagtcagcagcactttgtgttcttggcatgtagatgcagcctccccctgataggaccgccttctgtgtctccccctctgtccatgccagtttctcccttccataaagacgaggtcgcattggtcacaagtaaaagtaagccacgcttctggccaggatgactcttccccaccttaattaaaggagtctttccactcgagttagttaatgagggctgaattccctaagcacctctgccatttggagtaagccttctttaggggggagtcgtcttcttctccttctccttctcctcctcctcctcctcctcctcctcctcctcctctttctcctccttctccttctttgatttatttatttttatgtatgtgagtacactgtagttgtacagatgactgtgagccttcatgtggttgttggggattgaatttttagaacctctgctcgctctggttgacgccactcgctctggtcaactctgcttgcagtttatttatttattatttacataagtacactgtagctgatttcagacacatcagaagagggcattggatcccattacagatggttgtgagccaccatgtggttgctgggatttgaactcaggaccttcggaagagcagtcagtgctctaacctgccgagccatctcaccagcccaactccagtatcttctggctgcccagcatattgtctctctcaaccaggagcacacagttgagggttaacttgggacctcccgtgcaagattgaaagagaacaactcacttgcaaatctttttccatacttgattttaggacagttctgtctttctctctgtctcattgtcactttattaatcagggacggacagggctactttataaaagcagtgtataataaaccaaccagagtgtacccttggacttttgtctaaggaagtcctacttgatatgattttttttctctaatcaggcaggaagcagatgagcagatctgatattcccaccaaactcctataagaataatccaacggaaaaaaaattttttttcatcttgtttcctttaggactgagatcttggaggactcttactgttgcttaactgttcttgctttacattgatttctctctgtgtgtgtgtgtgtgtgtgtgtgtgtgtataaaatctaggcaggccctgacttgcctgtactagacatgcttccctcccatccccaccctatggagataaacaccaagtggtgataatagctggtgaattataattacaggtactccctgtaggttgccctactagtgaccctagtaaatgtgtataacatcaggtgaccaagagaaggccacccaaaggcagagtcctcagtctccactagagattgaggtgtcttttccttaacctcccatcctccacacacagcccaataagctctttgtaccggaacctgcagaagcaagagggaaagaggaggccatgatggttgtcagaagtgcatcctataaggtgttctgaattgaaagatttagggttgaggtctagaaggctgtaagttaatcagctctcttggtcagcgattctcaacctggggtctcaaccactttgttgtgggggtgggggtcacatatcagatgtgtgcattacaattcataacagcataactagagttatgaagtagtaataaaataattctctggttgggggtgtcagcacagcatgaggaactggattaaaggatggcaggattgggaaggctgagcaccactgctctaggtgagacttgtggctgcccagtgttgagagttccttgtgttgggagtttctggtcaaccagacttcctcagtcacttctgctgctggtagttccgaatttctccttcggatcttcatagtgcatgtgcagtagaggacaggtgtgcatccgcatctcctgtgagcagcctcgggaacggatggcttcccagggaaatcgctagtgaagccttcctcttgtctgaagtagatgctttccagaaggactcatggttcgagacaggatgagaggatttcatccatggaacatctgatctcaccgatatcttaattttcatattctctgtgatacaagatttcttacgtgacgactttgcgtgtctgtaatacagtttgccttctctttcctagcttatcaaaatcagcaaacttactattttagagtaaaagatattgctctaatagaaaattgtactagttttcaaagaactgcttggaagtagttaagttagcatttaagaataaaaggaattgttaggagcctagcctgggcttctctagctaacaggggactgcggggaaagaacatggctgtcctctctgatgggaggtcgcgtgtgatacctaccacctttccgttgcaggacagcttctgtagcattcactgctggttcctcggttcctcagcagcccttgaggagcaaccacagggagggcattttatctttgcagaaccctttctgttctctgcaacccatctcttttttgtatctccgagtggatcatttctgcatctcgcttatatgaggccgtaggtttgtccaacctctataaaaacctctcaggatgccctcatgttgtttgtgagtatgcagactccagggttttatctttataatcctatcctttccccggcctgtctaatcagtttggaagttttacattttctctcacaggttaacagatgttaattgctcacacccttaagtttgtgtgaaaatactgcttttgctgtctttgacagagtagattttttagaacccctaaagagataatggaggcaatctaggtgttgatgtggtgattaaacagaagcattagacccacggagaggtgctgtctgatgatgaagcctgctgcaccgatatttaacatagacatgaagacactgggcctgtgacttgacacattggcatactgtctttcagggtttctattcctgcacaaacatcatgaccaagaagcagttggtgaggaaagggttttttcagcttacaccttccacactgctgttcatcaccaaggaagtcaggactggaactcaagcaggtctgaaagcaggagctgatgcagaggccatggagggatgttccttactggctggcttcccctggcttgctcagcctgctctcttatagaacccaagactgccagcccagagatggcaccacccacaaagggcctttcccccttgatcactaattgagaaaataccccacagctggatctcatggaggcatttccccaactgaagctccttcctctgtgataactccagcctgtgtcaagttgacactaaactagcagtacacatacctttcctaaaggttctttccgacttgagggggggggcgggggatgtcattgttgtttgagttttgagatgggatcactgtatgtagcccaagctgtcctgaaacttactatatagagcatgctggtctttaccatcctagtgctggcattaaagctatggaccagcatgaccactttaatggtagaaatgccttattcttttgatacacacattgtgtacttctctctctctctctctctctctctctctctctctctctctgtgtgtgtgtgtgtgtgtgtgtgtgtaggtttcagggagatgatctcctcttaggttagaggagaccatcagatcaggggatctgagctctctccagctccccatatttggtggggttttgttgttattgttgtttagatttatttgtttgttttatgtatgcgagtacactgttgctgtcttcagacgcaccagaagagggcatcaaatcccattacagatggttgtgagccaccatgtggttgctgggaattgaactcaggacctctggaagagcagtcagtgctcttaaccgccgagccatctctccagccccgacacatcgtgtttttaagttttctagttgctgccatttaggtaaaggaaccacatgcagattgaccacgtgtttgcattctaaataagtgacacattgaagtcacttagaaaatagtgcagcaggacagcaccctttatggagttggatatgttccgagagcagttttgtttgcccttgcagtgctgatgatagagagcatttccatcttgaagcaaagcataagtgattgtcagccttgtactggaataattctaatggccatatacagtattttgtgaatgcatgtttgtgtagcacatggcatatagttttacatgtgtttatttgcactgcctatagttgtctctagcttattttatttctgttttttttggggggggatttgttttgtttgttttaaagatctatttatattttacttccatctgtgtctgtgcatcatgtatgagcattgcccccagaaggcagaagagggcatccagtcctctggaactggaattacagatggttgtgagcatgctagaaaaagtgaacccaggtcttctacaggagcaaccaatgcccttaactgctgaacacggtccagcgccttaagcctgtttttaatcttcggctttcgtagttggctcttcagggatgcatggcacactcagatgtacactgagcaaaatgtgctctgggaggtagaatgaagaatctggcctcacatgtcttttcttcttctcgttcatgaagtagtcatgctagagtcgtggtttgttgttgttggttgttttttaattgtgaggattagtgatagtgtgtgcctgtgcacaaccatacacatgtgtatatgtgtttaaaactgtttataacttttctctgaatgtcaggtcttcacttacaaactcagtgtgtgtgtgtgtgtgtgtgtgtgtgtgtgtgtgtatggacatggatatgtgtgtgcttgtatgttgatatcttgcttactctgggttctcccagggagggcacagcatctgctcctgcttacccctggctcacttcctccaccttcgtgcccaccacaggccttttgcacacactgagtactcagtgtctatttggaataatttccaaaactagctaagttcttgtctcttcttgtggcctcatgatcagttatcactttatctccttccatgttttaaaaaacatacttaacagaaagaaagagagagaaagaaaggaaagggagggagaaaagggagggagggagggagagaaagagagaaagaaacacagagagagagaaacagagagagaaacaaagaaagaagagattctacatataggagaatttctaatagaacaggtactagaagaagcggctgcatgcccctgctgtcttggacaactgtttgcatattccagaacacacacgtgcaactttctctctcagctgctttcctggacagtgttgatcttgcagaggctaaggggatattgagcaagtttccccccttaacaaacactcctaacactgatattctcaagagtcacctcaatggccatgtgtgcagaggcctctggctctcaggaattcctttgacccaggtctgggacctcaactgtaggtggtaatgttggttgtagggagaggggcagtcacagccagagatttcaagaccaggaataagaaggttcttgaataaatcattgcttgctcctgataacaaaatcataactgaggttactgaggatattttgaaggcagcttcaccgtttatgcctaggacataaagttttaatgcccctttatatatgcctagggacaatagggaatgaatttgactgtaacctaacccattctcctcatatctgttaaaaccctgtgtaagaaagagtgttggcactgccaggattggtggaaagtggcacattgcagtgtatgcttcttgcctgtcagttcagtcctaaggactggcagagtgtgtgctccattctttaaaagtccctcatggtcatgtgttgaaggctgttctctaggtttgaaagaaatgtgagggttgcttgggttagtgaggtccctggtcactggagtgtatcttaactgaatcatatgtgcagctgtcatgttcatgacctttttggtacttgtaaaacctgacccttgctcacaactggaaatttagagaaagaaaaaaaccccaagaacacaaagaaagaaagaaagaaagaaagaaagaaagaaagaaagaaagaaagaaagaaagaaagaaagaaagaaatctaggtggtattcctaatcctgaatgttatagcatgttttctctcattttaaaatatctctgagatgtggttttaattacctacaatatcctggtttcatggttataacattatttaatcactttcctaattgggaagagtgtgcttctattttttttttttttcatatgaagctgtcttgagcctctggacatagattttctgatctctcagtgcctctgggatcagtcaccagcattatagctgagtcaaaggctgtcaactcttggaatgcttttgggactttgtccatctcctgctccagaaaactggcggcagtaatttgtctttctggtagcagaggcttaaatggtttctatctaaactgtgttaggttatttttaagcttacgtgatttgttataaaaaacttcagtcagtatctttgcatgcgtttgtacattttatttatttattgtcacactttctaggtatttccccccgctctggagttctttgtaagtgttatttctttattgaggatttaaataagtatacaactctgatggtagacgtggggaagaacaaagagggggcttttcagtgactagaatgggtgagacatagtatgccaggtagtcaaaataaacatgatgtgtggcaccatgtagtgtgctgtagccattagcccggtgtgttttggtaatggggaacaaagtctgacccttcttatcgccatcccctgtggcccccagagccttcctatctcaaaggagaatgataacttccttcaatatggaccattttcagggttctgaagattaaccattgtgggaaagaccccttcatagctggcaggcaaggtagtgacttggcagcctatcttcttcaacctggatgtcatttgccttgaacgtacggcacaataaaggcagcccctgcctgccctgccactcattgcgccggccactggaaaaaaaaaatgtggttctcagtaagaattatttattctgataaaaatgagttgagtagcaggtgggaaagaatgcagctcgctgtgactaagtggagctggtcaggtattacaccaccgcagtgtgtcgtgactgaatgtccttgttcacagtgtcccggaaggttgggcagcagggtaaacccagacagggcaacactcaactctccccgagaagtgatctcatctacaggatctttgcctctcatgatggaaagtgagactgagaccccaagaaagatttacatctcctaattatttaaatccagttgaagtcagtgcagctccaaaggtcctctactccgtgtcaccaacacgtgggcacaagagctggtctcttagcgcagaggcccacaattctcagccctgccctccatgtttgagcatgggagagatgaccattgggaagcccttctttaggaagtttcacaaaatcaaaatggaccatgagcaaagttttcggtgtgcctccttgtgagaaaacaggaatactttccttggcacctggaggctctgtttaccacttcaacctcctccctctctgctcctcactgattttttttgtagctcctcgtgtgtcttaggtctgtaaggtaaagcgatttcacccttctgatgtttgcctgaaatgtcttctttggtacacagatgtgtgtacattgtgcttgtaagcaaatggctttgagccactcaagcgttctcctcttggctttgtatattctctgtaaagtaaggaagcacctaacatccttctacttagtacacattttgtcattttcccaaagtagacatttggttttagggaccggtgtgaaatttcaggtgtcttaaaattgcactagatcattgatatattctggagagagtcctggctttccttatttgacagtccccaacaaacctaccacaaatgcatccctgtggacgtggagcagagaggttgccccagtagcgaggactcacatattccaggctgaccttgaacttgctatgcaatcaagggtgctcttcccttcctgctcttgagtggggctacccaagccttctaccagctgagctcttcatcctcactttcattccttctcctagtccttgacacctctgctgagaccattctcactccagatggtgaagcctcccacggcctccagcttcctgtcttaggaagaacagatgtgtgttaagcaacctcagggaaggtggtgatgaggctgcacgtgttcattggacacttcctcaagtcaaccacatttctcgtgtcattcttccccaacagcttccttataaagtactggtgtggtgcctattgcctgcatagtaagattatggtacagagaggttaattatgtgtgtccttcaaggttaaacagcagcaatagggagttaagctctgggaagggtggctgcctccttacagtgtccgtctgggttgtctattgaccctgagctcctcagatcgcagcagagccaggcctttaaacatctagatttcctgctcaaacccatcaccaggctttacctccaatccttctgcctggaaccctttcactctagtcttggcctctgttccttcagattcccctctggcatggaatgtacccagctaagtacatttatggttatctcctgagatattcaatcactgagctctaaggtgaaactaggctcccagattctaagtggccctggcttatgtgaggtcaaagacaagaatctgggttcctggccaacttttgtcatagttatcattttatttctctttgctccaagcaggtggagcagagccagggcttatctcatttggaatgtcatatgcatatattaaatagggtgtggtttgaggcccagtaccaatgtggtgcctccttggaagggctaaaaggaagaaggctatggtttgccttttgtccacaaaataggaagcttgccaggagggagggacatcgaactagataagcctactttgtttcgaagatttgcagaacatactcctcgtccagttcacaggggcctgcagagcttgaacttcttacagagttctatgaacgttagccctgagctgtactaagtaccagacaccagaggagcagtaactagaagccaaggatgggttgttttgaataagatgcctagcccgagcatcttacccaggtgcctgtgggtatgaataacgaggaagtgtgggatagctatcgagctgtggttggcacaccctgttcaaaccctttgtggcaagtcagcatcacctcagtcaacaatcagcacaagtgggaagtagaaagaaacaaccagagaagcccccagttgcctcctaagagagtaaggaaaagaagcgccatttacagcagctgtcatatcgggggcatgtgtactcttgggcactgtgctggccattactggtgctcagcagtgttgatctgtgatcgctagataaccctgtgagttagggactgttgtctcacctcattcacgagtagcccgaaggtgagtgtggttaagcccccgcataatgggaaggggtacagcagagccctgtacactagtaactgctctccgtagctttacacttgcaccacacagacctttagccagctccagccccttggcctctggctgaaggctcttaaggttgaattatgcaccaggaagtttcttggtcaatatttcatagggtctgttagaccttgagcactccaggcagtacgtgtgcaggcgtacctttctcgtcacagttggaagacattgtcccgtggtcagagacctcacccaccaactccagccatgtgtgtcacttgtacagtattcaggggatacaaaaacggaggcgaataaatcacaagtggaagaatgtggatgttctattaaggtgaggcttagctactctttgaagttagttacatagtagccagcaattgcaatagcagctctaagtctaaaaacataaggcggtgtataggtactttgtgtaatgtggggttatgtgtatgggtttacactctcttatactctataccaggagtgtgttcttgagactgaaatcaggtattgagagcttttcaagcaatagattggtggctagaaaagaaaggaaacaaatgaactctagtgctggttaatgcacttttcaaataccacttagaacacttagttttccaaatgcaaatcagttgcctctgcatcagggaatttttctagaaatgttaattctggggttctctcctcaggttatctgagttttgcttaacccagcaatctgccttttagccactctctcttctccgagattctggtagactaaggcctgaacaatgaccaaaaaggccaactctgtcatgtcccagaccagagaccgccaaggggaaggtcctcttgagccttgtgcatgcagtagatgctgggtcttggtggctgtttttctgtttgtttccgaagtgcactggtaaaaagtgaacttgtctagtcaaatactcctcccccgaggcaagccttctgttttatgaacaaagggaaggctgatgtatatcttttttctgtatactaaaaatttacagacctttgattttgggtggatttggagtggggatgtatgggttggtgggtgggtttatggatgcagttatcctctacaggtgtgtatagagaccagacattggttatcttcctcaattgcttttgacatttgttattactactgccatgattattatttggttagactgactggccagtgagctgagagcggccagtccctgccaccccgacatgcatctacactcagctcttacatgggtgctagggatctgaactcaggtcctcatgtttgcacgacaagctcgtcacccacggagtcccctcccagccctgtgctgtgtgttgtgtgctgactatcctgtgactgccagtctcttatgaagggttcctgacctaaacttagcattgaaaataacaagtaggagctactatactcaggatcttgaagtatttcctgtagtctttgcgaatactccagaagtggttaccattgttgggatggtccctgaaggctaactctctccatggtgtgttgggagtggtttctaagacaggctctctctctatcctcaagcctcaaacttctacccagaaattccaaggtttcgttagcgcaacaccctgggctggcacaatagaaactggcacaatagagtgatagaaagaaatgatcaggtatagataattaaacaaataaaaactggaagggtaaattcataagagagctttgtgttttcctagtcctcaagagtaacacatgggaacaggttatttttttctacgagtgtgtgtgtgtgtgtggggggggggatgcataaagaggtcagaagataacaggaaagatagcagtcagctttctccttccacctttatgtgggtaccagggattggactcaggccatcagactagcactggtacctttctgatgagccatctgactgttccctcccccattttttttttttaatttaatgaaaacttgaatagtttagagcatttggcttagcagaatcagtgcatcggagtgtatcggcactatcagtagacagtctacactgggtacacttctcagtacatgtcttgctaagaagatgcctgctgcccaagttaaagactgtgtagtatgtcaggaaacttgaaatctaatctagacttttctcaagtctctatctttgggtgaccaccgaattttctaggcttcaacgttgacttctgaagtgtttgctcatttgatctggtatggtttaggggagtagttgttgttttatatccactagaagaaaagtgtttttccccaggcggtagaaatgagactgggattgggcagtaaacttatgttttcttgataggtttttatttgtgggaacaaatttcccgtgtcacttcatgaaagtgatgtcaatgttaggtgttggaaaaaatcacccttaaagttagaacactggtttctttgtgttgtttcgtttgggctctgtttgacaagaacatctattaatatctgctgattagtttatggacataaatatgagctagggtgttaactggtgtttgcatcttaattccatgttgctgtttttgttggcttgtttatttctaatgaataaaaaagtatagcgccattaaatgtgagctctttccttgcagcgacccatacgtgaagctgtccttgtatgtagctgatgagaatagagaacttgctctggttcaaaccaagacaattaaaaaggtaggttggccaactttttatgaatttcatctaagttataatttaacattttgtacttttgctttgtagcaggtttgtgttttaaggataagatagcaatatttttttaagtgtcccttaagtattatatctgaacatcacccatagtccaaaaccttctcatgttttatttgagttatctgtataaagttttttccccttataacacatataatcaaacaaataaatcattctggttaatgcaatattttttataagaaacacgtaagctgtaatttaaagtttatttaatgaaatggattgtggaattagcaggcaaaagagaaatggattgatttgaaataacttatggaaggaagcaaaatgcttagttatgggaaagtaataaatgtattaataataaagatatatatgtatgtgtatatatatgtgtgtgtatatatatatatatgtgtgtgtgtgtgtgtgtgtgtgtgtgtgtgtgtgtcttttcctgttggtgtgtgtcgcacatgttcatgtggagggaaaaataaacatagatgtgtggaggcctgagataaaaatatatatatatgtgtgtgtgtgtgtgtgtgtgtgtgtgtgtgtgtgtttgtgtgtgtgtgtcttttcctgttggtgtgtgtcgcacatgttcatgtggagggaaaaataaacatggatgtgtggaggcctgagataaaaattagatgacttccttaaccattctttccctatttttgagagagggtctgttgctaaatgcagttctcactggcttggtgtagatggacaggctaacaagcactggatctgtctctgtatccatgcagggatggcaggtgctatgcattgctccacccattgctccacccactgtctacatgggtgctgggacagcaaccgttttttactgactgagccatctcagccctataaaaataatgtctaaatccactcaccccgatgcttttgtttacctatataaaatgcagggatgttttcttggggatgggaggcggctatgtgaaagctgtatgttttctaccaagaatactatatttgtgttagggtttgtttgtgagttactattatcccccaacacacacacacacacacacacacacacacacacacacacacacacacagacgcgcactgtttctctgagtctgttagatagtctcaccactttgccaaaatgtatcctgattccgtgattgctttaaacatattgcatccttcctgctgctatggagacacttcagatctctggcagagtggggtcattctgtacaggaaacagtactgtggtgtccttcacctgacattgagacgagcagtaaaatctgttttcaaacagacgccagtgcacagattagtgggaggctgcctaggagaacggaggccattgttcccagtgttaggcgctggtatttgttctgttcccagtgaagctggggcacctagttggaacagcagtcagggggcctagtcccctgctggactagagccaaggacacatgccaatgacgagggtattgcaatgtctttcatttggagtggcagccctgtttctccctccgttcgccagctggagggagtgtctccatccctgcagccagcctcctggttagtatttgctgtgctgtcttgtgccgtgttgtactgttctgtgtcgtgctttcgggtcagctaaggcttcctctacctgggtccctgctccattggctttgtggtctctttttgtcctttgcctgcctggcaacacctcctacttcatcccatgtacctgtcttccaggtcaggaggggaacattcacgcatacacacacacacacacacacacacacacacacacacacacagccaattccatctcatttctattcatgccccaaagtgtggtcattaagggagggttttttttttttttttttttttttttttttgaaaagtaggggtggggggaaagtgggatcttgctggttttttttttaaaccaatgcaaattgatcattgttggtgttgttttgcatgtgtagtgttctgtgtttgtttgtttgtttgtgtgttttctttattttttctttcctctgctaaaaggcaaatgtgtcgatgacatgttttttttttttttcggtttcagaattttacaggtcatttttacaggttgtgtttctctgacttttatgcctatatgtgtgtgtgtgtgagtgtgtgtgctcacatgcatgcgcatgcacatgcgtgttccctcataaaaaagtgctttatattagtttggaaagacattttgttcaggccaagcatcaaaatatcattgctgtgttcttgtgagatgtatatttaaatagattgataaaatatgaatcagacatggagaagatcaaaggatatttttaaataagtttttttttttctgagaaaaagaaaaaaatacaagttccctttggttataatctccctcccccccccccccgtgtgtgtgtgtgtgtaatgtgtggtgtgttaaaatcttatcagtattgttctttataaaatatttttcaaatgtcaacgttgatgtaagtaaggagcgctttcagccattccaagtttagcacagccttgtagcaaggaaaggggagtcagcaaagtttacttccttcttgacagagtaaatcatctttaatgccatgttctgaagggagtgtttgtttctatagctcctttgtcagtatgtccagcatctttccttcgggtgagctcattcatggtttatggtttcatagtcatgagtcgtcagccttataacttctgaccctccacgtgcgtcctgggtttatagaataggctcaataattgactaaaggttgctttcattgccattttgaaagtcggttttatgaagaaaatgtttgtgcaagtgtgaagagcctgtattatattagcaactgtcagtgccaacacagctgaagattcacaaaataatctctcttccagacgctgaacccaaagtggaatgaagagttttattttagggtaagtttttcttctctttcgtaatgattgttattgatctctagattggtattgagatatcaaaaaagacccctggaaagaaaactagttagcattttaagtaagagatttcccttaagacagagaatgtttgggcaggtagcctctgagtgtgtcccaaattttgaagatctgtggaggtttcatttggagctatataggagagataaaaaaggttgtcaaaataacgcacgtgttattttttttcaactcaaacttttccttaaaaataagattgaaataagtctggttaattttagtaatgggattgttttgtttgaaaaaaaaaatggaatttgaagaaaaaggcaaggagcaagtgcagtttaaggcaacagttgaatttctctgtgatatggattatggtctgctcatccactgtaggaagatgattaaaaggaggcattgcacagtgccagtgatgaggtcagggctggttcagtggtagaggactacttgcctctcacgccggacaccctgggtttgatgctcagccctgcctccccacaaaagacagaaaaattaccagttatgttctggttagaagggaacggtttctaattcagagatctaatgcatacaacgacttttaataccactgaataggggagcatttcctcagcccccggcaccccctgttcagagcagctggatacagaagggcattctctgaactagtggagactggtgcttactggtgtttgctcgaagatattaggacacattaaggcctcgaccatttacttgggaaagagaaggcctttcctatttcaaaatgaaagcccgagttgtctatacactctgctattaaacacctccaaactgctccagctttggccttctagtgccgccaggcccagggcgcaagaccctggcttcttcctctcagccgtgctaggatatttttttgcactgcgaatttggataacttgaccggcatctgttttctattatgttcagagctgaaatgtggctctgaggttttaacacttggtagatcccatgcccagcctctaccagatatattctagataactctgtgaaggaccaaaatgctgtcggaggtcgagaagggtctgttactggctcttagctaactctcagatacagcaagcaaccttctcgtgaaaactccagacagtttgtactcctcctatttgaaccacattgtctaaattttagtagatataaaactgtttcagtgaatcataccggtgggcatatttttgttttttatttaagatctttattctattccttccacaatttcgtattgaatgcctgttatgcgcctgttcctgctagagactatttattgctgtattcctgatgagtgtggggccctttgcagacttgatgaacagacaaccatccttctgcttgttctgttgctaagcagatgtggacccagggccaagagctcaagttgggctcccaagctcaatataatgccgttccatgttccattaggaaggagcccaagcctagcattagacccaagtcccatgtctgtcctgaccactcacagcctctgaaaacaccaagcattcactctcctggatcccttttccccaaagaaagagaggtgtagtcttttcttccctgattgacaggcagggatgcaaacatcagtacctggtgccatgtctgggaaggttggtaactagtcaacggcacctgagtctacttgatgaaacatgggattttttgggtgagtttggagaaagagaaagaagcaaacagaagcagcctcggggtgtgactttaccttgacccagggcaagttctgattgctcagtatactgactcgtgggttcctgggcaaattgcttcaagcccctggttccagtgatttctggtgtgaaaatgaattggtagttacacattgttgggttgttgggagaattaaatgaggccatatagtgttagtgcttcaggaaattatagttgtaggcgggacattaccatagctgagcataggacctttacctataagggtacctctgtagaagacataagaagtccttatagactgttgagaatcactcttcaagagaccatgatacacgtattgtctttttctggtttgcccagatattagggtagaataacagcatacaagtcagttattgatatacagtagattcctgtgtgctaggagtcattcttaattattcctgtctcttatttcaattttaaaattatacctgttgatttttgaattatcgtttctgttccttttaggtaaatccatctaatcacaggctcctatttgaagtatttgacgagaacagattggtaagtccttggttttgagttttatttctttaaaactgggtttttcgaaccatgcctttcagatcttctgggtcacccgcagtgcgcatgcctccaagaagactgcttttgtttcactgttaaagttctcagttccagcaaatatttgtgtgttgctaggtcagaaaattgatttgagtatgtgtgtatttcttttatagttaatactaataaaagtcacctatgacgacctcaccccagatgctttgtttggggaatatggataggcgtgtgcatctgtaaacgaagccatcaatcttataaacaaaatgtttcaaaatgttcctcagacatataataccacagcaaattcaccgacaactctatggtgatggtctctggggaaacaaaaatctaattaccagttagtttataattaaagcaagtctcctcagcaggtgaaatcaagccagaggtactttctcaagaaaaatctttagaaaggaatttgagaggactagcataagggctataggtatggctccatggtaaaggacttgcctgtcgtgtgggggaggtgtggctcagtggtagaggacttgcctggtgtgtgtgaagtcccgttcccactaccgtaaaaacaacatatccatacatgaaggaaaacccaccaaaaccaaaataagaactctcaaagacgaacttgaagaagagctgatataactagcattttatatataggctgtgtgtgtatgtatgtttgcatatgtgtgtgtatgacatagaatatacagtgcatatgtgataatcaagacagctctttggagtgagttctctcgttccacttttacatgagttccagggacacaggtggctgactggttttgcatgacgagctcctctatctgtggaaacatttggctggcccagtgttttgttttcctaagtaacttgagtgtttacatcaaattctcatgagccaagtgtcccagctatgaaaaggaacatgatcatgttatatgtcagtcgttcaagcactctcagaagtaggaatacaattccgggcgcgtgattgattccactcctacttactgtcctgcctaaaaggaaggtgcatttgtgagctcgtccttctgcagaattcgatagaaactcagcaaactgtaaaatagcttgaagttgacacagtgtatccataagaagatccctgagacaaagttatgcattccctattactaggaatgcaggaactctggttccaagggtgactgtggcgaaaggccagcgaggggatacacagggtcagacgccttgtcttgttagtgtcagcctatgcgggggaatagcctgactttctactcttgataaaggatttgggggtggatgtaatctgatgtatgtggctttcgtcttgcaaatggagcactagcggattgaaccttgactcccagcatctttcctgttataaatatgggattgtggtggcttctttgaaatgaagtgtgtcttgggagagtgatcattagaggtgaggactaactctcctgtgagttgcacagtgtagcttccagcccctcacacccctccagcgaggcccggccagtgaatgaaatagcagcattcattgaaataatgtaagcagtctctgcaagaatggggccttcacacactggtacttaccctccaagaaagtcattttttaaatgaaacagtggtcaaacttgaagactctctatgttcttctgctagagaaatgtactgtttaaaagtgtcagatttcccattgtgtgtgatctaaaataatgactgcagtcgagcgaccttgccatgggtaggaaaccatgtttccaaaccaaaagggggctttgaatgcagagcgattaaaaaacccgatgagcagttgtgttttatgtgttcatgtcatgccttgccccgggctgtctgctgtgtggttaccatccacagaatgtcaatggtgctggcggtggcttttttgctttgttgtctgctaatccagcaaagacaatacgtgacctgagtctatctacttggaagttctggcactgagcagatgagagtctaggtttcacagaggttattttttgccattcaaaactctgagcttttagaaaacaagtttgggtgtgtgtaaacactggcttaatccgccacaccctctgctccagagctgttgacagaaacgagctttgtagattttaaagtacgttttttgtcactctttgcagcctggcattttccccttttatttttttaaagttctgcctaaataaatatctttgttaaggaaccaatgtttctggggcataggaaagagaatatttccaggtttgtgatgaatctgatgacagtttttggggggggcattcacttttagttctcaggtcttttcttgcatgttgcaaacagaaagattctaggtttgtggcccaactgtggtaatcttgatgagttctgcctataaaaagagttccaggcatttcttctgtatgatattcaagttaaattactacaaagcccatatacacactcatcatcatcatttctctctctctctctctctctctctctctctctctctctctctctctctctctctctgtgtgtgtgtgtgtgtgtgtgtgtgtgtgtgtgtgtttgtgtgtgttgtctgtgtgtgcctgtatgtgtcatgcaaatgggattatatgagattgttttcccaggctgggtttcttttctctgttaactgctgtgtctggcaatcatatcataatcacacccctctttaaatgaagaatgtttctagtaagtagcaggaactggaccaggcccacagctggctgtgcagtagtgtgccccctgcgcctccacttggctattttgttacttgtagatcatagtctaataatttcccactaaagggacactaattccacagggtgtgtaatcgtatttatagtacattttattacttagcattccctcgtggtagtgtggtgatatcataacagtaacataacatttgatgcttgagagagttcaccctgcagccaagctgtattttactcattctccgatacggtggggaggtggatgacatagctttgggtacttgtgcctggcatccgctcgctcgaaagggacctgttgctcttggtagctgggaaagcagtgccctatgagtgtgataggtcagatttacagcatggttgctagtgcctgcgctgctgccttagtcagctgccccagctccctgctgggccgcccctttctgacaggactgcagcagctgggaaggtgctgtttcaggctcttgctgttcagagggggggaaaacagcaagagaggggaaacttcactaagtccagaagctggcattggaggggaagcaggcggtcatgtgtctctggccatcctaccctctgtcacagagtagatgagagctttttgctcttacccaatcatgcctggaatgcagctcgccacttgggctatttctgctatctgtcgctcttggtgccgcagtgctaacggtttggcagatgggacactttttcttggagttggtgtctttgggttttgacttctggcagtgccgggcgtgttgttgtcgctcgccctctccctcccggcccccctggtcaccatggcccatcggcttcggtttcattttggctctggtcgcagcaatacggcccctgagtctgagattctagaccaggagagagaagaggactttttcatggcattccagacgctgccacggagaagcagcccgcactccttcacccagagcacaggggaggacagcggcctgcaggagggcgtgggcgctctcaagcgcagctcatccatgttcatcccgcagctcctggcccgggtggacgccaggcccacccgcagctcctctgtgcagatctccctgcagcgaaaggccgcagacggtgccacagacagctgcgggccaccggagggacccgaggacaggtccccaagcacccaggctgacctcggagaccaggccgcagccacaagggtctcggctcagatcagctcatcggagccctctccagtggacactcctggaagctcccctccaagggcagcctgggacccggggaccttggtcaatggcacttgtgatcaccatggtcagtgtccccacctggccgagggtccggaggaggccaccccaggcctgcgcatccaacaccgagcctcaagcgctgacgtgcgccaggtgcggctgctgcctttcggcccagatggccaggctgagcccaggcgctggtccctccagcatgttccagatgcttctgggagctccgggaagcgttgctttgtctttcaactgcagcagccccagcaaggcgctctggggctgactggtgacttcaactttggcttcaccggcactaagggggacaggttggtgagatatccacgcattcgactggaaaggagcacgtcataccctacccagccccgagctggccgggtaagccccactgaagaccgcggaaccccagaagcatcacctcgggccagcagggtggtccccgagatccgcaggacaaattcagagaggaccccgcagagcccggggtgcatgttcaagatcaggcaggatcaaaatgcagggcagcagcatttccgaattcttgtgactcggggaccagaagaagccccccaaaaccaagaggagactcacaagagccctggacaccctggagctggcgctccggtaagtccactgatgcacatgtttgagtggctcagaagggaccaggccaacccagaaagcttggttattttgcagcgcaaacctctgccgagggagtatccctcgctgttgagtcaggggatcccagtgttttggtagcagtcaatgaagctagttagcctttcaggggaaaaaaaaaattcttttccgtaggtcctggacgtcataaagctctgtctgttttggaatctgcagcttaatgcacactctttttagatttccttctggatgaaagaactttaaaaatatatttcttaaaattattctgctataaaaaataagtcagcacctagatgtgctgatgttggtagtgcgtttgaaaccctgcttgcaaacacggttctgacaactgtcagagaaaactcaaaggctgttgggaagactaggcatttgagcctcttcatcaaggccgtacttgattcttctaaagacatcattcgttctcgttataaagtgtatcattgttgggttttgtgccatttggtaattctgatcaagtgtatgtgtgtcactctgaagacagtaggagatgtgtccccgggcgcagattggctatggacaaggtaccacgggaaagctgtggtgggggcacattacacagcagtgtaacttagctcagcccacttgagagttcaagccaaggatgccaagggatggagccgttctccagctgtggaaaccgtccttagagggcattctggctttgttgcatgtggggggtttgctctctcctttctgtgaaatggagtacagagagacagctgtggactgcccagcccgaatgacttgcagctcatgtagtttcagtcagtcaggttgccttgtgctagccttcactcgttgagtgttctctctcgaagaacagcctccaatttttaaatggtctccctccccggaacttcttgtgattggtagtctcagggtatgatcatgaggtccctgtggacctctgtgtttgggtttcagtgtgatatgtctttttaagtaggcagatgagttggtatcttagaatactgtgggcctttattgatttgtgtttggagtgtttctggttagtcgggtaaacttgaacacccccccccatcattcaattttcacccgtgtttaggaatgaacaaccatgaaaggcaaatggagcctttcctgctttgttatgtccattaagtcttatacgtttccttggtccaaacccatacagtttccttgactgtaacacagatctcagtgtgtcttgacagtgtagcagtttgtttaacctaccccaagaaatcactatagaaacagtttcaagctttatcagcaccatcccgtgttcagccaggaacagcccccagtgaggaatgcctttcctcaggttgacgtgactgctgaaaacggaagtcctttgtggtgtttaggtgttgggtacagatacagttacatgactaaactcccagtctagaatctctaaagaaatttttaaaaaaggtgtcctaaaatttcgtggatttttaaggatgtaggtttcaagaactatgtagatcactggtcctcaatgtgtggttcatgacccctttgaggaaggagccatgtatcagatatttacactattgttcataacagtggcaaaattacagttacaaagtagcaatgaaaataattttgtggttgggggtcaccacaacatgaggaacaatgtatgtattctggacacataaaaaattcacatgtggttggcaaactgatgcttttcttttaagcaaaggtctttcccccagaacaaaaaacaaaacaaaacaaaacaaaaacaacaaaataaagtaggcaggcaggaaggaaggaaggaggagagagcagacttggtcttgtaatggaacgatctgtctattcaccagctttgtatgtgtatcatagagaccaagggtgttaggcttggccagcagctgcctgagccttatttatcttgaaggaaaacattcacttaggcgtctacagtctggctgtcactagcctccttcagcggggttcagttagctgctgctttactcttaaggacaggtcatcgttattctcaatgaacaattaagcacaaccgattactcagtctgggtgtgagtgatgtaggaaatcttttgatatggaggtccttttgcacagcatgctcagtgtgcttttaaatgtgcctcccaaacattctaaatctaacgatattaaccagctagattcttagtagaaaatacaggggaaatctgggtgagagtagactccccaaacatcacccataaagcaaatctgttcttaaaggtaacagcaatagacaagaaaatgtctccagggtcttagaattcaccctctccatctgtggcattcttggaagtctcttaatgaattagttaccatcatagattaggtttttcggtataagcttcctggctatatttgagttatcctgagatggttaggctgtctttactcacacacaaacacaaataccctttccacaaataactgtcaagctcttccttctccaagcctactggagccagcttcctagtcccattgatactattaagtgttcaagggcttccatatgtatgctcttaacctttgttacttagaaaggcactaactggggagtttcttaatttcttgctgacacaagggtttgtaagtaaatggagggaggaggaccctggagccaaagcgggaattcccacaagggagtggaggggagaaccttaccttctcctgcaggccttctgagctccagcagtcttcagtagcgcagtagtcttttgtgaatacaggtcaacttcactggacaacaaaggactacgcgaattattttcatctggagagagtttcaggttgagtgtctcccagcaaagcctcttggcttttacagaaaaaaaaatatgttaatagttattaactataaaaatactccaatcaaattttagctctcagtttgttggaaagaaaattatgttgtaatagaaaagggagaaagttgtagtcttttaattgtcttgtgcttttggtttggttttgtttttaacagattttataggttttctgttttatcttttctagtgtattgatctctctccgtgaggtcatgcttgagaataacccagggctatgtgactcactttcactcaaccattttcagcaacgtcttaaaaattgtaaaggcagtacatggggctgatactggctagggtttgtcccccaggtcagctggtacttgaagtgatagcttgtggtatggaacatcataactaagatcattattattatcattattattattattatatcattaacattattatttacttagaaaatatgatatgaaggcatagctatcttactgggcgttgccaaccagtgtgttaatccactgtagatggcatcatgttgataacgttagcattacttgtattctgtagtgcgttatgtgcatatgactgtatactcacacgcacagcatacatgctgagcctaaaggcggttgtaatgttccttgtaatgcaacgttcttgtgaaaaaacgagtgaagcgccatagagctgttagcactgtcctgctggaggtaggaggcagctagggccctcagcaggctttggctctggggcctggggtagttagactcattcttcggcaccatcagcagtgaacatcgtaggctacctgtgagcagtcagtttctgagtaacaggacaacaaatgttgatggcgtatgagggaatgttgactcttccatcatcatgtcttccccaacctcttgtctcccatgtggcccgatgataattccattcttaaaaggaattgagtgaaggacctttggttatattcagtggaggctggggttctttttgtttgttcttaatcttgcaaacgtttttggctgcatgctggctcgctctgatggatttgcgtggtgacactcatactctgcagaggcagagggatctgtgtggtgtttcctcactgtgtgactttaaaatgaaggttgctgctggcaatgcacctcagtagatcctgccctgcctaacagtggttatgatctgggggtgctgctgctctgcttggggaaatattgaggcagacttccctggtctctccagccaatcactgacctcatgatacatataataagtgtactgtcttcataggggctcagaaggccaaaagacttttattcattgagagttattgtaaaaaaaactaggcgtggtggtgcaagcctttaatcccgcattcaggaggcagaggcaagtggatctctgtgagtttaaggaagttccaggacagtcaggggtacacagagaaatcctgactcaaaacaccaaactaaaccaaatcaaacaacaacaacaaaaaagaattatcttttgagtcccatttggttggatattttaatgtagccaacactaatctgaatggccctgctgtttgttcaaactgaagccaacagatagattcttttagttaaagtcattaaatccatgttcttgctggaagggtgtaactaaaagtccctaacttcctatttgcctttcagttcctagttgtgaaacagttgtgataatagcagaaaataaaccccccctcttttagatgctgaatacacagtggaggatctgaattccttcagaaaataccaatagactgccagtcccaatctggacctggctggtggttggtcagacattagcctgtcacagtcttcctgtttctttcttctacaaaagaggtgtagaagcctaccagttgcctggaagaggcagccatacacacccctctttagacacagaaggatggagtcttgaaggagaaatgatgatagtgggcttcttggtttgtgagattgctgaaagtgtttaacaaatacttctctctcaggtctttcaggacacacaatgctgtcacggagttttcttcctaatttacccgatggcgttgctttgactttcttgagccaactgatacccagagagggtttgcttcagggagagctgtggcccagggtgagtgggccagtaagtccctgtgccctggccagtttgaggttgtcttgaatccaagtgactctgggcagcgccgtgtttgaacagggaattagtttggaggctagagggtggagtagatggaattttaaaaagtctgcttcttaaagatggggatctagagctgtagctggttctgatccctgtgagtcaaatgttcccatctctcagccaagggaaccaaagaaaccaaaggatacattaagttagagaaccctgatttcattgatttgatgatcgtggttactctttaaaattgggttacattgtatctctaaggctgggcatgtagcataggatgtgggaggtcccatgttcctcctcaacaaaagtgtgtgtgtgtgtgtgtgtgtgtgtgtnnnnnnnnnnnnnnnnnnnntttcttaagcaccagttcagctgtcctaatttttctaaactagccagtgttttaagtattagtaaagaggatgaaattctaccaggtagcaagagaataaacattcccccccccccccccaggtaaatgtgcatctcagaagtcctaaagttcacactgccagtttttatagaagaccaggagttcagcaactttccggtctctgcaataactgggggcatctgtgtggccaagcgctccattcctggaggctttctgtgctcagggttagtgacgtgtagagatgcttgatgcagctttgtccatctttgagagaagaatagtgatttttcacgctcgagatttaagaagtgaacgcctttaaactgtacctagtgacccatgcatgttgcatttgcccacatccttgactgcccattttcaaagcttcatgatctcactgcttgaggatttcccatgtccctttagaatgtagggccacatatgaacctctagagaggaaaaacaatgctttggtccaaacttttataattaaggtgggtaggtatttaaagtgtatcagaaatattgaaatatgtatattaaaactcgagcctcctctccacctaaatccaaaaattttagaactttttcaaatccagtttttcaggctagatgttacagcccaggactaagatacgtcttgacttccttaaggaattaatctcaggtgggcgggtagaccagcagcaggtgctctgggcttctttgttattctttattaactaaaatggctttgtggcatcatatggccttattcttggttttacattccgttaaagaggcaataagtggcttgcaacctcaaccgttttaatttagtttgaatattttggatgacttaacctcgcactagtaaaatcatgttgcttgactgttggggaatctaaggttggagctaatacgccgcaatggctgatggcgttgttcatggatatggttttcaggtttggctgtttttaacattctaaagttccgtgtcgtgaaacgttggagttcgttgaaatgaagttctgctctgagcagaggccttcctgaggatatgcttgttttctgccttgttggggctgaactagagtgctatgcatgctaagaaggcccctacgctgagccacactgttgtgattctgtgctttctgggtgtttctgtaaagctttccatagttacacggaacgggtgggaggggagtgtgctgtgctgtcgcagtcatagctgggtttgtgtctgggacactgtgggaaatgatgaactctggaaattttcatttctgcttctacctacgtggagtgggtcatttggtagggtgtgtatatatgtgtgattatttattttttttaaatcctggccacaagaatgtcttcctgaaattatagtagtttcagtattctaattcctgctgtcagacaccgatggcctgtgtacagatcgccactaggagctttttctgttaccactttaattgtatttattgtacagtctcacagtagttacccctcctcctctcctcctccgagtccctctatatgccccatccctaacccccccaccgctagcctcatccactcttcctttcattctctttagaatagggccagcctctgtgtgtatcaaccagccatggcagatcaagttgcagtaagactggggacctccttttcttttaaggctggttaaggcaaccctgtaggagaaaagagttccaaagacaggcaatggagtcagagacagcgcttgttcccacggataggaattctacaggaagaccggtctaacaactgttacattagtgctggggaagggcttaggctccctggttggcagttcagtctctgtgagcccctatgggctcagattgattgattctctgggttttcatgtggtatcctaaacccctcttgctccttgatttaaaaacaaacagaaagaaaagaaaagagaagagaaaagaaaagaaaagatgtatattttaaaatcaagtcccccaaagccctattacaatcaaatgaaagcctgttactcaaggtagccagccaatcacgaaaatataactgagacaattcccttccctaagagttttaagacttttgtctgggaagaccactggaatccagcttactgccgcctgccagaaactgtctgtgttgagcagctattttaaacttcatcctccaagttcagagagcatagggctatctttatccctggtgaatggtttattatccctgtgaaaggaggagttgcacacacataagagagatgctgtggtgatatgggggtggggggtagtccttgcccatagtggccttatactcttagagagcttcttatgtccggtatctagttttgacctgctagatactgaccccagaactgcgagaccacagaactcatgtggatgtctctgacccctttgaacccagaaggaggtgtgactaatggacagtttcctctgagattaaaacatcccattctgcagagaagctccttaaacaggaaggtaaacaactcgaaatagcttcaggaagtccccaaaactgatgagattcactaggcccctccctccctgaggaaaaggctgcagagaatcacactcagacaaagccaagctgcaaagaagactcagaccagaccacctgctttgaagagatttagaccaactgagtcagttagaaaagacactcctcaatctattgagctgcctgcaggctgtgcagtgtgctcctggctcccagcttttatgagctgtcacccatgttggagtaggcttgggtgatataactgtctgagtcatttcttgctgcaataaaacccactggtttaccaaattggattttgctggtatccatactctggtctgtcttgggttctctctcaggcatgagtagctgtatatgtagggtctctccagaaagctgtcacccaaccacaagcaacgtgtaaaaagggtacatgcaaagaaaccagtatttcgtcatgaggatgaaagtccatagttgcttaatctacaaagatacctgagtctggggtgagagtaaggtttatagtccttctttggtcaggtactaattgggaatttttttttaaaaaagattgcaatgaatatatgtgcatgcatttttacatcagtgatagaaaatccctcatcacacttttcccacttgccattgaggaccgaagggtcaggctgccaagaggaatccaggcagtgatgtccacgcagttctgcacttgttgtctgtgtcctggtgatagagcagaaaaatcctggatgtttctaagtggtgatgtctatttcagtgcctttgttttgttgggagtattttcgatgccacgggggaaggagttggtcatgttgtcctgactcatgcaaccataatatttatttaaaccttaactgaagcctcttcttctgacaaataagacttttcgtctggtggaacaaatccgtaggactccccagaaggaccctcccgagaccctaagatagataaatgaacttggtagtggatcagatggataagcactcattaagttagtcattaactcaaaactcttctttcaagccaggtaccatcccagatggtgggaccacagcaaggagcagaaccaacccagccttccctcatgccacaccattctgttagcaaggacggggatgagcggtaaagctgctcacccatgacagaccagagggtaaagctcagcataggagatgatggcgagggctacagaaatggaaccaggacagggattacgtgaggcagccttgggggatgtcgaacacatcaagtccatagctgggaggagatacttcagagggacaagtgtgtacaaaggacttaaacgccaagtacacttactgaataaagggaatggcaaggaggggcacaaggtggtgctaagtacacaaggacggcttctagcatcattcctgttgctgtgatgaaagactctggcagaaagcaacttagggaaggaaagtttcatttgacccctcaccccaccaccagttccagtttacaggccatccctgcagggaagtcatggcagcgggagcttaaagcagtcagtcacatcatcacatcggccgacaagagcagagggaaatggatgcgtgtgtgcttagtactcagctcgatagttctagcctgagacaatccagggcccaaacatcggggtcacgtcttcccatgtcaatcaagacagacctacataaatgtgtccatgggcaacttaatctagacagtctccttgagactcttacaagactagattatgtcaagtcaccaaatgaaggtcccctccatagatagtgtccctcaggaaaggagcatggtcatggggtgagcagatcatggaacatatggagatgcaaggccatagaaggaacggctctatgggggtagagatggacacagtggccactctactgagagtgttcaaggcagtaggagctgagagccaagtgggcaggctattgtaagctcatatctccttcaaggatggaaggtcatggtccctgacttacattgttgtcgccaacccttccctcatccccagttactccccagagtgccaaggataatcgtcagttctctgaggaggtcacctcacctcagtatttagcctgccattttcattttgcaacgcttggaaaaatggagagctttcatgctcctccagggagtgttatttcaagatgtcttctgctgcctgtgtcgggccagggtgtgggtggatgtatttttgcagcttctcaccagagagtcggcttctgatttgcagaccgcatttattatgggtcatattgtccattgatgaataatgtgtgggctgcaaagcagatatatagcttttaaaatagatcatttatcctgcaggcttcatcccccagtaccaggcaggctctccagccgcattttctggaagcagagtttggaacgtttccttcacgatctgggtcgtcagttcatcttctggcctgtcatgcatttttccctgatcagctggggacttgagggtgggctcccaagcacagtgtgaatctattggcaaagacatagtccaggcggggtttggggatggtattggaatgcctgctgaggaaatagttgctcctttgagctactgaaaatatttcttataatgaggatttacacaaaaggagaaaatagacatcatggtttctatggaagtcctgtgggtatcatgaagtaaccgaacccagctgatcctcatgaccgcagctgtagaaccaggcctgtatagagaggttctgtgtaggagaagatgatgtgtcttggggggagaggaggaacctcctgctaggtataatggggtttgggagttttcctctagtggtccagggcaccatggggtctggaggtggagtgaagcacagtctcctctctgatgccacccccacccctagtctgtgggtcaaggacctcctgtcacagaaacctccctaagggttgttttccctttacacagagttcttgttttgcctggtgtgttgcaatctgcaggcagtggccaggtgacatctgttggaatgctgatgtgcgctgccaagcaaaacagatgcaggaagatttgccaacgtggggaagaagggacagagtgagcggtcgagggtattgggggcagacggcaataatggccgtatttatagactggaaggctagcttaatgccaccttgctttaaactccttaggaaagctttctaagttcatgccgctgtctgcaagcattcagagaggcttccatttcccaccctgcatccaaaatggtgtttaaatggttcagcacagaaggagggatttcatagcaacatgttgttttctgtaaaccactggccaccagattttttttttttttttgaatctgtgtttttgttattttcgaaacaaggttgaatcaaacccagactggcctggactttgatccatagctgagactggccttgaactcccagccttcccttctctgcctctaatttatcggagttacaggaatgtgccaccatgcctggctacctatgttttatattagtttattgatacgtttgccagtttgctgatttaactcccagtgggctaagatctgctccaaacactgcagatggaattcatagagttttattgatggtgattatccagtaagaaaaatagacttgtggccagaagtggcctcattggccatgaaggagtagagaagtctaatggttacttttcttctccatttgacagtactggacaagaagcaactgaggggaaagggttaactttgataccaacacagcatataggagtgggaggctgctggccacatttcatgcatagtcaggaaccagagagtgaacggcaagagaggccagattatgcaaccccaaagtctgcccctgctggcctgcttcccctgtctagcaaggctctacctacccagacagtatcaccaaagaccaaattttcaaatactggagcccaggagagttttcatattctaactgcagcagagtgttaatacctggggttgcacacaggcaattctgaggtacagtcagggccaagagcagctgggtaagctgatgcagctgacatcctagacctgtttgatgaggaatagccatggatgtgacatgccatctcttcttacctggccttcatcactctcaagtctgcctgccaagtggtgcttgggggcgtgctccgcaaaattaattcaggacacctgggtgacacctttgcattaaggcaacgaggtgttcctgtgaggagtttcaaagtctgcatgatagagcttgtctcccggaatagctcagaagtaaaaggattaatttttcttgtcactttccaactgtaagaaggaggtggaattggggttctaactctagctggggacaggccggtctgtcctgtgagcctgggcacagatgccttttctcccggtagctgcattttctccctactgcaaatattagctgagcacatttttgtggcttttggaatgccacttcttaaaaagaggagggctgttgtcagatttttgacatttctgacggagctgggaagtggtgtcttcttattggaagcagaatctgtaaaggggaaaaagacaaagttcctctggttgctgtttttgaattagatagtatggtcccttgtccaagtgtagctctgcaggtcccaccaaagtttggatctcagggcccctgatgcccaaactaccctcttcctgctgtttggggtttaattgtaccaaatccgggctctcgatcgtctccattgagcgaaccataccgggacagctcggctttcagattgcccaatagctcatgcttacattgctctctgtggtgccatcctaagtagacaggggcttgcatgtcccaggttttgtttctcaaggtgacctttgcaacatataatctggttattcttaaggtcactgagcttatctgttagcaaagcagggaacaagggagatgactcagttggtaaaatgttttagcttgcaaaagctgagaatctgactcgattcgtaatatccatgtgaaaaagctggacatgaagaaaacaacagattctactggtgcccggccagtgagcctaacctgcccagaaagctccagaccagcaaaagatgcacctgaagaaccctggagttgaactctgacctctgcacacgtgtccacctgtgtgggcaaacacacacacacgcgcgcgcgcgcacacacacacacacacacacacacacacacagaaatgttggtggggctaataagaggcacacacttgcttctgttttgacgttctcagagccctatgatctcagagatgtctggagcacatcaccagtcctctgctgagccagggatacttatgcatctctcagagcagtggccctgtgtaatttgctgcttctcggtggctgaggatgtaggaggcggctcactaagcttcggcatgtatcgttgttcatcagagtaagatcataaaggccgggaagaaggatgctaaatagtttttaataaagtgcgtgctgcctgccatcttctgccttccatcgtatctcctttctggctcgctctttgtctgcatccagcatctctataatcacacttttagaagggtggatgtgtgagttcagtaggctcatttgaccctctctatctccagccatggtgagagaataagcccttattaatgcagtgcttaataaccataagcaaatattaactttctgttattgctccctctggaagaggagacaagaattcctcacgggtgtttgaggactgaatttgtcacaagtctatctgctgatggtggtgtcatcagcaaacggatctcaatttatacttttagtcgccacgtaaggaacgccatcctttcagaattaatgacttttctaacatattgtaatggaagagtcctggagtgggaggggaaatcaataaaaaggttttttgggttttgttgttgttgttgttgttctttttttcaaattttatgtctcacttgatgagcaccatcaacaacttttccttttataacttcaggttacaggactttagagatacccaggtttatttacttttgcaaaaggcctcagtgttcttgagcaatggctacctctccttttgatgtatttcttaaaagttgttctacctagtcttcattaaacccaattttaagtcactcttttagaagcatgccagaaaaagaaaaaatagttgtaaaatggttttatttgttattttgaggcaggctcttatgtagcccaggttgatcttggaagccatggtctttttgcctccagctctgagtgccgggattataagcaggcccagtgtatgaagggatgggggtcagccccacggcttcatcatgctgggcaagctctccaccaactgagctacatcctcagcatacaactcatactaagaaacctgaggtcagtatgaattgtggtgattataatctagattgaacagcatcaggggatgggatcccgcctcccacaccagctgtgtgtgtgtttgccttttggtaaacagcagcctgaaagtgtaactgatggaggggtttccccagtcggggttatcaggtttgtctgttggtaatgattatattagaatgtgtttctcttcggtccatgtgatttgccaacctaatgccaactgtggttctctggaatctctgagtttcaggagtctattaataaagaagatggagagaattagttgctaattttgggtgcgcttgaaacgagattgttagcaaattttaccttcagacctacaaccgtggtttgctgtccatcggacatcatccttgggacagaaaataaatacagagactcagggaaaaaaaaagtctgacactttccatatcttatatttcctttatacttgtcagtgttccttaggaacatgtatatttcttttcttcccaggtttgtgttaagatttgacattataaattctaccaaacagagactacaagtctgtactggtcatgaattctttcactaaagagtaaaacctaagtaaatgtttacttctaaacccctatgagtagagagtaagtgttcattgtcactgacagaaggaaattaatacttacttcagcctccacctagcccaacaacaaggaagaaagaataaattgaggccaggacaacatgtgacacgcctgttgtggctaccgggagtcagttcagctaggtgacacttctgaatccgttggacatcctaggctctgggaagtccacagaggtacaagtattaaagaagacagaagggcctgtggtcgttaccagtagcaaagagaccctgatgagtgaaatatctgcccaaggaagtgaacaggagtagagacaggaagttccatggatgtatgtgtgtgtgtggctgtgtatatacatacatcccatgtgtgttcagacaaccaaagagactagaagatggcaacagatcctctagacttaggcagatgtgaactgcccactgtgggtgctgggaactgaattcaggtgatttggaagaacagcaagtgatcttaactgctaagccataccttcccagactccaatgctggctgttttaaaaataggaggcagccagaggaataaggatggcctagacactcccatctctccttctggattttaagttctctctctctctctctctctctctctcatagtgggagacaaccttttgtttccttaacattctgtgctgcgatttctataaggagctgtaagggtccctctacggtctttaggattaaataaaactccttttgtttgtttcctgtggtacattcttagaatagcaatatctctgtgtgtcccaagtggctgtagaaccggtattgtggctatataacaagtcaagcagacgtacttatcattctgtaagccctaattgtaccattctctttcctccgggaaggccttcctggccttccctgtatgctcttgatatagccagaagaccatagttacagattacatctatggcaccttctgaaattcaaaatagaacaatagactaggatgtagctcagtacccattgaagcccttggtcccaaccccatacactgatgaattcatgtaatcctggtatatgagaggtaggggctagagaatgagatgttcagagtcattcttggctacattaaaagttttgagggagcttggggtaccacatgatgctgtcttgtaaggagctgaagacagcatagatgagcaaagacatcacgctttgctcacccttctctatctagaagtggggtgaattctaccgggctaagctgattccatctgttagcttatcctgtaccttctggttcttgccttttcaaatgcttgcttttgtggagccagccactgtggaggcaagctcgagttagttatttagacagttccagaagctggagaaaaaggctctgtggtgaagagcgcttgctcatctcccggtggggggagctgaatttagttcctagtagtgtcaggcacttcacaactgcttgtaactccagctgtagggcatcggacactacctctggcctctgtgggcatccatgctgcacataaataagagatacacattttaaaagagagaaattccagcctcctagccatcccttacctgtgacagattggggaagggatccgagcgaccatagttgagcccatactggctgacaatggatgagagattgcaggggctgtcatggtttttgacctttacttttaggatggtttattaatggtaggtaatcgtgagacagtggcctcagcattctctcgtgagagatcgaaccttgtcagcaaagcccacggtaggtgagcctttcctgtgcttgcacagctgccttcccggaagctggaggaggggagccacgcacaggatgggccggcagcatagctcagggatacacttggcggagacagctgagaaacagctgcagtgtggccctagtaagctgagagagtgggtgttttgttatcaactaaaggaagtcagaggctggagtctttatctgccatattcttagatgctatagagaaagaagtgttcttagccatagtctgtgctgggtcccagacagagtgtgtcaatgtgatcgatcacacaggtaaatggggaaggatttcttctcaacaataaagaatggcttagaggggggtgacagtgtttattttcaatcttatgtgcctttgtagtatagtgcccagaagcatatgtgtggtgtgtgtgtgtgtgtgtgtgtgtgcatgcatatgtgcttgtatgcatatgacatggaggccagacaagttcagatgcagttcctcaggtgtcacctatcttctttctgaatggagacttcgtttggctcaacaagctgactgactggtcagcaatcccgaaggatctgcctgtctctgccacgttatccaacacggagatgactggcatgtgttgctttgccctgcttttccccatgggttctatggacgacggaacttggatactcacactcacacagtgggaagctctttactgtccgagccttccccatagcccagcaacacagaaggagcaataattggactcatgaactgtctagcttaattacatttactttaaagtccagatatgcacacagagtcacaacacaactgcaaggtcataaaatacccatacctcagtgtcatctgctaagctaagctgtatgtacgtcagcctccaggagaaaaagagggagaggaagtggggagggggaggcggaggaggaggcagaggaggaggaggaggagaagaagagaagaagaagaagaaggaggaggaagaggaggaggaggaggaggaggagaagacgacgacgacgacgacagacagacaggaaggaaggaaggaaggaaggaaggaaggaaggaaggaaggaaggaaggaaggaaaaacaacaacaacagaatttcatttttgagcaacttggaaagatacaaaggtcagatgacatgtcccatgagtgatgtgcaatccccaggcagctggacattcagaagtgacaaggtggcctctgagtcagccttcctggtactatcgccacgttggggtgctgcccacacatgttggggttctgcccacacagccttcccaccagagcagccccagcagcctcgggctgtctctacctgttacctgcctgagacttcaggtcagtgacaccctatttgagaatgcgatggctgcggtgggtgaggatggggagactcccaggcctggccgtccaacagagttgcctgagggccctgaagtccacagtggcaaggtggcatctcctaactggctccacaggatgctcagtctgaccgtcgtcatctttcagtgtgctggagttaatgccagcaggaaggactggttaccttcagtctttgaccgcacttggcacgcccacaattctttcatgtttacttattatttatttatttattacatgtgcattgctacacagaccatgacagaggtcaacttcgtgaggtttccacactaagcacctcaccagccctggacacttcttaatgttaacccttaaggtgacaggttctttttcaagtcaacaagagaaaaatgcacacttcagtatgtgtgcagttttacaaatggcctgttagggtatagtaaggaaaattctagatttgagagccattgacctgtcctccatgtgttgctggctctaaacatttctgaattcattttctatttgtaaaacggcaatcctcgctagggtttctgttaaggaatagtatgaggtaggtttacgatctatgaagaggctaatgttctacaggtgtggttgactacaggattaggaaaacacttgctgtgggagttaagtctctagaccagcggttctcatcctgggggtccaccctttcaccagggttgtatatcacatatcttacaaatcagatgctttccgtcataagcataggaaaattaatcgttatgaggtaacgacgaaaataatttgatggttggggttgaagagctgtacggaagtgttgcagcattaggaaggttgagaaccactgtgccagacaaagctgagcataaaaccctagcccttacttacccttcagcccttaccctgaccctaaccctgagtggaaaaatcctaaccctaaccctcactataaccctaaccctaaccctaaccctaaccctaaccctaaccctaaccctaaccctaaccctaaccctaaccctgagtgtaaaatcctaacccttaccctaactctaaccgtaggtgtaaaattctaaccctaacccttatcctaactctaaccctaggtgtaaaatcctaaccctatcccttaccctttagcccttaccctgacctgagtgtaaaatcctaattgtgaccccagcacctgaggctttacacctcaaagaagaccacctaatgttacgaacaatcttcagtccgattccagcactttgtggctgtgggcagctaactgtagaggaaaatggacacctttggttgctagggtgattgatggggggaagccaagtccctctgtttatgtagcattattgagttggacctgtttcatcctggggaatatctcagtgttcggctcccagctgctcctgcatctctttgtgtagccaggagagaagggaaagtggtgtcgcacgcatgcatgcatgcacacacatgttaatgagcagaagggaaggcccctggggtatgaagagaagtcctgttagcctgaggtctctgctcagctggcccaagaagcttccagaaggagttggagtagtattttggtaaaaacgtaagcagtcaataaaactgggaagggttatcccaggatgatggctgaggcccccaagaaagacctgttctgcttggtcatcacgcttgtcctggagtggagtgggaagaacggcatgacctgggggatcagagtgtccgcttgactgtcactccagacagacatcttgctaatgtggcagctcttcactgtcctgtgacagtctgtccttcccagatctctgtaggctgttcatggccattggctcaaggcatctttgtgactcaaatgggaacatgaagacaacagtttgtgatttcagtgaccaaggcacatcagaaaatgacctaactgcatttttcttactcttttttaactgttaatgaccatgaggatttgtattgtttaatttcaaggaaaacggacataatattaaaaaaactcacattcagtattataatttagaagtctgatttttttggtgtgtttgtttgtttgtttgtttgaaacccttccccttattcttactctccaatgtttatctcctacaaggttgttgtcatatcttaactggatgaattcgctagattatagttaaaaatcagcagtttttatacacactccagacaactccactttcagaaaccatcgaataatactgaacaatgcctcaataaaaactggcaacctcagaaatattttcttcctggcttagctattttcaccttcactgtagtacgaaatatcaaagagtatttcttttctgatggtgtgtgtgagtgtgtgtatgtgtgttcgttcacgtgagtgcacacagaggccagaagtgtcttcaattgtcttctccaccatttctctttctttattttttccagacaaggtcacaaggtctttctctgatcctacagcttgctgactggcccaactggctttccagagagctcctgggatcctcctgttcctgtctcctaggactggtgttatgacatacgcgtgcacatggccttttgcatgggtgcccatgcttgactgagccgtctccagacccactttgattatttttaatgttagtgtctagaagttcacttagttctctaatagaccttgactcccagctaggtataaacagttcagataattcatctacaacatgtatctgtcacagcctgttccagtgttagccatggctgttttctctgtaaagggctaagtagtataatatatagtataacatgtcttatgtgatagcattatgccctcagttttgaatgcaaaaaaatggctcacagaatattttggtctctgccctaagtctggccagatattctcaacagaattctagctctttccatccatgcagcacactcaacagacggtcaactttttctttttcaatctatgagcacagaacatgtgatgtgtgtgcgcacgtgcatgtggaggccagaggacaaccttgggtgtcatcctcagcttcatcttctaggagacagggactgcctgtggcctaaggagcaccagttaggatagacaggtcagcgagctcccgggacgggacctccctgcttccacctgcctgcagtgggattacaagttcactctgccacacctaaaagattatacctgtgagctctggggactgaacttaaattcttgtgtttgcaaggcaaatgctttactgacttgactggtcctcctccagtccactttataatccgcaccgctggatgcggtgactgtgactttcaaatgttgggcagcgccactcactaactgccattagcattgtctgtttgcagggtaatcgttggccttcttcatatggcaggatcagatgggacctgagggaaatcagcgggcctctggagtgcagagctggatttgacggaagaaaggaaagcttttgggccttggtgagagaaatgagaaagttgggacggatatgagggattcaggagacataaagataaagcagatttcccaggcttgagtgtctccagaaggcaggaagctgccatgccgtgccatgctgtaccaggaagtcccagcaagagagaaaacctggaagcagttcggaggggaaccacaagctagggctctagctgagaactggtctctgcgaagtgttttaggtatatttttccacatgctcacacatcccagatccttgtaggagtgtgtggaaaggaaacctactgctaaatattatcatagagaaaagctcaccccaccatctcagtaagaggcatttatgaggtagactgtgattttggcttttaaaaaaaaaattagtcaaatgagctggggagatggctcagctcttagggcacttgctgggcaagcatggagatcagagttccaatccgcaggacccacatacatgccagatgaacatggcagcccatttgtaattccagcctcagaaagtagagactgataatctccacagccaaacttggaaacagaaggttcaaccccaggcctccacaggcacactctgtacacaagctcgtgaaaaaatggtggtggagagggtgtcaagacagtgagtcattttgaaactaactactttgcaattaggtaatgtgtctcatatagaaatggtgagacacccccaccccctgcacctgcattggtgtggaactgcaaccctggaaacctaggtgcaggactggaggtgttggcccagttgatactgtgtttctctacgtcatttatgaagccctaggttggatcccaaggaccacataagcccaacagcagcagtcacagcccttcttgggaggtgagggcaagacctacatggcaaagtttttgatctactctcaaaagaaaagaaagggccttttataactgtttttgtttttgtcctgacctgaccctttactttttacttcgaccttgggaaagcagtagtttaatcagtatattttgtgtagttcccctgaagctggctgtcagacccgtgggagaaattgaaacagtgaccacctgggaaaagtttggtgacctccagccatgatggcgacctacactaacttcaatcaaatgcggttagagcactcctgttttggtcttagttttgtttccataacttctagcaaatgtctctctgtggcagacctagcaatgtaaaactcatagaacctctggcaggaagaggctgtgtagacaccatggaccatctggcttgatggtacctctgcagtgtcatctcgagggatggaaagctttgggacaggagctctgattgccagtgatgggagagaatggtgggcatactcagagggtcctgtcagtgtcttcactgcctcatacagtgtctggtccttttaaatatctcctcatattttcagtaagaagtgtcaagcgctttaaattttatttctttaaaaagccttttatataactgaagtttaacaagctataacatttcctagactgtgtgtctggatattctgtttaattataaacctgttgccatggagaagggatggcacagacctcagggatcttgtggctgacacgggaagtagaggagccactgcacagttggatacatcttagcgcaggtacaggtgctccgtgcccatcccagatgggttgtcaagcacattcttgtatttcctcttcgaggtatgtgtccctctcaccctccctccccaacacccatgttggttgtattggctggttttgtgtcaacttgacacagctggagttatcacagagaaaagagcgtcagttgaggaaatgcctccatgagatccaagtgaaaggcattttctcaattagtgatcatgagtgggaggtccattgtagatggtgccatccttgggctggtagtcctgggttctagaagcaagcaagctgagcaagccaggggaagcaagccaataagtaacatccctccatggcctctgcatcagctcctgcttcctgacctgcttgggttccagtcctgacttcctttggtgatgaacagcagtgtggaagtgtaagctgaacaaaccctttcctccacaacttgcttcttggtcatgatgttttgtgctagaaaagaaaccctgactaagacactggtgtagttcaaagtcaagagctatataacttaaaagttctgagttcggcttggagcagaggatttcatattgagactgaagacctactgaattgatcacttctggaaaaagaagtactaagatgcatgctccccccatccccccccccacacacacccgaaagaacacttcctaccactgcttagaaacctgagagtttgtgcccttggtgtctccagtaagtgggccatgctaagaggctgggttacactggtatgttttcaagcatgcaggtgtcatggcatgtttggatgtactgtgaactttcaagtaccagagttgtggaattccccaaaagtcctaatgatgttgcctcagcttttggtacttaagaaccttgtccttgttcaacatgtttctgaggtgtcttgaaagggcgagccacgtctccatgtttgtgtaactaccataagaaattcctttctggagctgcacaactcttgtaggtgcatgggctgccctgaaatccatggctgcctcgagtatttatgatctctgtttggccccgttgaccacatacttgacacttcacactccttgccatagcattttctacttcaggggtaaagggggtgttccacttggtcttttgctaacagcaggtaggggacacttcttcaaaagcacaatcatcacaccttggaagcttaactacaaaagtatccctgggtcctgatgctgcacaaccaacttcatgactaactttgagatttgaagtagcaaagtgagagccgccagaagcagtaagggatttctttttgcaatttggagtttatcttgatagtttcttttgccagctaatgtgaaagtgacagattggtgtgtggccaggtgactttcaactcaaaaaaaaaatctggccttcaggactgctgagctcattttgccactgactcacccagcacgttgtgactggtcccgttctgtttagaaagagtgaagcgccaagtttaattgagggagtctaaaatcccctttgctttgagaaatgaggagcttggtgctttcctgcctcctgaggcactgccctaggttgattgcgtgcatctttggcatgtgagatggagtgagcgctcaccaccagctctgtgagcctatgtccgatttgcatccttctcttggttaatgattaccatccctgacattgccttctttctgctgcacacaagtctagaagattcacagaggatttaccactttcctacccagatgactgggtgtaccactaactcgggatgctgagtgtccccagggagcagtgtgcttcccgcaggtgtagcaggcagaagctgcgatggctccaaggcttccagtggcttgagatgctcacccaggaaagatgatgatttcctggggtttttctttccttgtagggtttcctttcttcatttttattctgtttggaagcattttgtgaactggatatcaatatagtaagaaaagtggattataaaacttggaataaggaccatttgagacacaaagaagtcttcggccggcatatatgttgcctcagtgaagagagtatcactcttaaatctgatccctgacctcagtttaattaggagaatgttatggtttatacatgcatggtccagagagtgtggaccttgttagagtaggtgtggcctcattggagtaggtgtgtcactgtggagtaggcgttaataccctcattgtagctatctagaagtcagtcttccactagcagcctttagatgaagatgtagaactctcagctctgcctgcaacatgcgtgcctgcatgctgccatgctcctgccttgatgataatggactaaacctctgaacctgtaagccagccccaattaagtgttgtctttataagatttgccttggtcatggtgtctgttcagagcagtaaaaccctaactgagacaggatgatgggaagggtatatagaaatactacaaattgtataagttacatttggatcatgaattattgtcttagtcactgttctgctgctgtaaagagactccatgactgaggtaacttataaaagtaagcatttacttggggatttgcttacaatttcagggggttagtccatggtagccatggtggggagacagatggcaggcaggcaggcaggcaaggtgctagaagggtagctgagagcttctgtcttatccaaaagttggagggacagggagacagagagacacagactgggaatgctgtggggtttttaagccttaaagcccacccccattggcacacctcctccaacaggccacacctcctaatccttcccaaaacagtccatcaactaaagaacagacatttaaataaatgagcctttggggctatctatagtcatccaaaccaccatagttattatcctaccagctccaaattacttttgtgtgtgtgtgtgtgtgtgtgtgtgtgtgtgtgtgtgtatacatgtatgtggtatatgtttatgcaggtgtgtaatgtctgtgaaggtaaggacatccctgtggaagccagggatcaagatttggtgtctttctttgttccaccccatctcactttttaattgagttttatttattagtgtgcttggatgtgtgtgttttatatgtggaggcatgccatggtgtatgaatgtaggtcagggacaagtctatggaattggttctccctttccaaccttatgtggctgccagggattgaactcaggtcatcatacttacaccgttactcagcaagtgcctttacccaccaagccatctggccaacccctccttatttttgagacaggctttcactgaacctggaactcatctgttcacgtaggctggccagtgaacttctgagttccacccatctcttgcccccttagtactggaattgcagacatacattgctatgctagacttttttacattgttgctgggtgcctcaaagttgggtcttcctgtttgagcacaatgagtccatcaactaaagaacagacatttaaataaatgagcctttggggttgagccatttctccagcccccaagtggtggatttattttagtgtaactgaatttgccattgtttttcactgtagatatctggaagttctactaggatctgatagtaacaatgctctcttgatcatgagtaagaatgcattaaggtgtaatgttagcttttgatacattgtagctttcctttcattaacttttttcctctatactgaagtcctagggaagcctagaggatgctcatttgcggtgtttcttggtttcgctttctgttgctgtgataaaatagaacactggcccttcattagaaaaagtcaaagtgtcagacattcagggcagtagtaacatctcacacagttaagagcatcagggtctcagctccattcctctgctcttgtataatccagggtcttctgtataaggaatgacgccacccatggtggctgacacttccatctcaatttatataatcaaggtacaccctgctcccccaagatgtgtccacagcctatcttggttatcctagactgtgttaacaactaaagataagtatcatgggttctctgaagtaatgcgttagctgatttttataatagtttcaggtcttcctcgctgtcttacataactgaattttaagttatataaaatgtctttgggtttatctcaatttcatactgacccttagtagggcttcttttatctatcttattttgtgttctctctttaaaaaaaaaatgctgttgaaatagaataacttcactttccttcttccctttccagccactcccagaggccctccctcaaatcccttccatggatgccttcaagttgatagcctttttctttaattattgttatacactcatatgtttatgtgtgtgtgcatataaatatatgcataatatataaatatatgtgtgcatataaatataaatccagtgtgttaataaatataactctcactgagtctttttgtcctttgtgtatgtatggttttagggttgaccattttgtattagacaacctataggggcctcatccttgggagcggctccctctctatcacctcgcactagttgcctggagttctttgtctaaggatggaaccttgtgaaatttccccccttcatgttaacatggcattgatattcccactgttccagtcttatttatgtagccaactcttggagatattgtttcacagccgacgctcttaaccataaatgcaagagtgtcatgtagctgtatttattggacctaggcctttccccctgaagatgtatacctataacatgtttcttaaaaatgttcagccacttgggccaacagcattccccacaaaaaccatagagtaatagagaaaatccaagtaccaaacacaagaaaccctccttttgaactgattgcttaggataatccaggtgactcctagaacatcatagattatcaatgtcaccctctgttgtctctcggggtttgaaggtgcacccctatagctgtataaatactcataattaaacccaggacatcataattcaacctggatctgacccaaaagcctcttttctgtggtttcgctaccatggttacagagaataccatgcaagctgccaagggaggaaacaattaaacagtccgacccagctgcaacacctgtgaaccatgacagtaaccagcatggtgagatgtgcgtaaaggtataagtggttacccttttctcgtgtgtgtgtgtgtgtgtgtgtgtgtgtgtgtatgtctatacaaatatgtatacagatatatgtatatataaatatgtatacagatatatgtatatatatatatgtataattgtttatatatgtacatattcgtatagacatacacctatacatatttgaatgtgtatatgcccgcctgagtctgtgtaaaccacatgtgtgcaggtgtgtccttgaatgccagagctggggtctaagcaactgtagaggggttgtgagctggtgagggagctgtgaacctcacctggtctactgtagagcagtaagcactcaactgctgagctgccactcagtcccctactgggggctcttttaagcccctgtagtgatcacactcatttttgtgaactttagcatcttctctctgaggacatatttctgttttttatatcctgccacatgttttggggaaaataaagtaggaccgtgggatatgttattctggctgggctgccttgtctggtctcagtggaagaggatgggcctagcccctcagagagttgatgtaccaggatgggggctgtgatggtttgtatatccttggaccagggagtggcaccatctgaagttgtggccttgttggaataggtgtggcctggttggaatgggtgtgtcactctgggtgtgggtataagatcctcaccctagttgcctggaagtgagtcttccagtagcagccttcagatgaagactagaactctcagctctgcctgcgccatgcctgcctggatgctgccatgctcccaccttgataataatggactgaacctctgaaactgtaagctagacccaattaaatgttttgttttgttttgttttgttttgttttgttttgttttgttttaagacttgccttggtcatggtatctattcacagcagtaaaaccctaactaagacagggactacacgtggaggggggggggtcccacccactcagagagaaggagatggggaaaaggattgtgggagggatgactgggacggggcagtgagcaggatataaagtgaataaataaaaaaattaattgatggctcagcggttaagagcactgactgctcttccagaggtcctgagttcaattcccagcaaccacatggtggctcacaaccatctgtaatgggatctgatgtcctcttctggtgtgtctgaagagagtgacaggtactcacatacaaaaaaataaaaattaattaagttattaattggaaagatacccaaagattctctgggtaagaggtgcagactttgtctttttgttcctttgttttcaccatttcagttgtccaaaatcaggtggcttgctgcctggtattattatgtataacaatgacatagtaaatacttgttgacagaatgcatgcattaaatatgcccttggggccttccttaaaaaccaaaccaaacaaacaaacaagggagcttctgctgttgcttgtcaattgcaggaagagtggccttgcgtacttcaaggttgtctgtgaaggtcagtgctttgccatcctagagttaattaaatggctcctgctacctcatgttgatttcaggaaagtttttccggtgtgcttcctcagcacgacatgttccttcgtctcagctgtccgtcagcactgtccagaacgcccaccctgtatagaattcatagcctttcccttttagctctgtttcccttacagacagttatgtttccatgccttctgtcaggtctctctctggatgggttcagttattggtcaattcggagagaaagaaaccctatacaaaattgcctggtgaagtctagaaggaatggtcagctctcattctagatgcttctaactagtttctggaggaagtactacattagtccccctcttcccagcacacatactaacaccctttccccctcaaacgctagctctgacagggttgctatcaatcaaatcaacttgtttgtggaattaatgttaaaccccaagtagatagttaatgaactgtttcccctcttttaaagccatttttaccctataaatctcagagtgttcagtgtgctgttacctgggttgctcagccaatgaagcaccagatattaagatgcagctctctcaccattgcaacatctttagcatattttctaagtagctcctcatagttctgatatataaagtactgagttgttggtacacagttcagaaacattggaggttttcagatatgagtgcacagtctcactcagtgtcaaagtctatcggtagtcattcatgatggttatatttaggtctagagtggcaaggaatataaatgcaattaaaacctgaacatcaactctatgatagtcatgctaatgtaaatgtagaattgacatagcaaacatttaccgagtatctgcttgtagaagtacagttctgggggttggagagatggctcagcggttaagagcactggctgttcttccaaaggacccaggtttaattcctagtacccacatggcagctcacatttgtctgcaactccagttccagggaatcggacactctcagatataggttacaagcaggcagagcaccaatttgcataaaaaatacaaatcatgaaaattgataaagatgttctgttttttttttataaaaaaaaacaaaggacagtagttctagataaagttctttcttacctttgacatgtgatatgtgcagttatgggtgcttatgtgcatgtctgcaggcacggggtctgtgaatgtgcatgctgagagccatgactgacaagggaagtcttcaatgattgttctctaccttactgattgaggcagggtccttaagtcgtgcccagaattcactgaaacaggctggtcccagtagccagcttgccctaggcatccctggtctctgctttttgcacactgcaattacaagagggatgccatacccagccaacatgtacatgggtgcttggggatccagactccagtgctctgcttagagggtgagcactttacccacggagccatttccctggcccctggctttgtagagtttaagtagctatcacctcacttctcccagggccagagtggccatcagtatatcaacacggctacaaattcaagacattaagttgacatctgcaaaccttcactgtcattttctgaaaggtgagtgttgagaagcatttcaaaataccttatagatcatcccagtgttcaggaggcagaggcaggtggtagtttgagatcaggctggtctacataatgaaatccaggatagacggggtaaaaccatgatacatcatcaccatcaccaccatcatcatcatcatttaataccaccaccaataataataataatagtagtaatggtggtaaaaacttcttaggaaacatcaccttttctgtcttgctaaactgtttgtggtttaatttagttataaacttccgccagtgaattatggtttaggtatggcagcatcatagaaagatgaaaaacgacatgcgtttagtccagtccttgtcacgttgacaaagctttatgagaaatgaaagcaagggtcagcatgctgagagctcctggagtcagacggttccagaagctgcagtgcggcccagggtcaggttcatagcacccgggaccactcctgaggagggagtttggaagagctggcacagatagaaaaagccactgggttcgctgatgcatattgggcgcagtgatgtaggctacatcattttcacctcatttgcctgccctgcaggtagaaattatatttaggatcgtatctggtggccaggagaggtgctcctagaaggtttagaatttctaggacattttactctctttctgctacagtgttaaacaacactttggctcacctagaatgaacagctgcaaactggcgttatcacagaaggaatttagagtgcccatggcctttgagaaactgggagccgtattttgaacaagtctttaaccccttggctagactcataagttgatgctctttgagtttaattttatcctcgtttaactctctcctaaggagcttaataaaggtctgtatgttcacgcaagcagctcttcatacagcatgaaattcccatctcattgataaccgtttgcccactgccgaagaattcaataagacagaatgcttgacttgccgacagatagagggcaaagtgtcactctttgataaaccagggaacagaagtgaatttatgtaaaagaagtgcccgaagagaaaggagatgcagtttctctcctgatgtgtgcttccttcgtggagagatcatagcaagaagttactgtcatagtcctagagtagaccctagttcacaagacgacattggtcctcacgatcctgagttcccttctgcaggacaggctggctgaagaacatggctataggagttagattcagaaagccctgcctttacacgaaggttccctgctcctgttctaaccgctcttgaggatctagagctacctaaaaatgtttaatatataaatatttttgcagtgtgaggtctttaagaggttttgtggggagtgtttctacttgcttcctcatgcatcataagttttgtccaaaggaaaactccagcctcggtgaacagtggagtcattgtgtggggcttgctttgagctcaggtcagagacatgcctctgacaagctgcatgcttgccatgaccatttgttctgcctgaaagaacaatggtagacaaagaccagagctcactcgctctgagacaaagccgagtgagtcctcttagacctgttgaagaagaaaaatgaggagggagccataacaacattcatgtacgtagttcatcttccacgtccctttacatgcaatccgatcatagcttgaatgcgacaaggaaataacctttaaaaatcaaattatagtagagctctgctaattcgtgcctgactgatttgccagcccagtagttcttgtagaaatcatgctatccctcaactaaatgtcagagggaaatgcagtattagggtatagagaaggctcacattatctagttcaaggctcatgtgcaaaatgatagatgtccaggtattgtgaccatgaccctgtaagagcagaaatagagccacaaaccagtgaagaaaagggaaacccagatagtacttttttttttaattgttggatgcttgtgtcagatgttagacttggatattttgtgtcaaatagaaatgctagtcctatgggtgggccccctagtttaagaaaacctgctgtcaaatacaggagtaagctgtggaaacgagtgtctgcctctgtaagggctgaccatgaaacaagctagaatctcagagaagtttcatagtattttcagacagaatcttgttgcgtgcaaagaaataaaaagtgagccaattaactatgtgccgtaatgcgtggacagctgccagcttcagtttgctctttgccaaataaaagtgcaagggtccattgatactgtttccaaaacccttaggatgaagagctaccagatgtgtctgagcagcagaagtggtttgttttgtttttaatactgggcagatgtgctgcactggacactttgccattgtgtccgtgtggcaatcagaggacaacttgcaggagtcggttcaaccttctcccatgtaagactcagggatccaactcactttcatcagacagagcagcaggtgcctttacacattggaccaactccccgaccccaaaatatgtctgttttaattgaagggtgggaactaggtcagattgttactttgtagtataccctgccccaggctggttctaaactcaccatcttccagcctccgcctcccaagtactggaatttcaggtttgtaccaccacccctgacctcggatctgtaattttgtactttcaaaatatggctctaagccacccaccgtcttgcacatggcctgtggctagtgtgcctcttgaggtgtaagatgaagccccacacatgctcaaaggcccattcctccagctacagtagccgctgccagggatagcaagagaagcaagaaatgcttcagcaatgagggcaaggaagcctccacttggcacctcctcaccaccaagcatttacttgagtgccttcagtgtcctggagaagagagtgtgccctgtggaattcgtacataaaattacatagtacaatagaacattaatgtatatcgtacattaatttatctacccctagcatataagcaagtaaataatattaatgatttacaacattaaccaacaatcaacatactatatgtacttcaacatgcctactaattactacattaaattaatgctttacggacatatctgtgttatcagacatacaccattatgtcataaagtcttcttttccatatgactatccccttccccatttggtttattaatctaccatcctccgtgaaaccaacaacctgcccaccaatgcccctcttctcgctccgggcccattcaacttgggggtagctaatatgaaactttatcagacatctggttcttacttcagggccattaaatgcgtctataaggtgctagagtgtgacatgactgttgcattttccaattacacttcaagttaacttcattgtaccgctggctttgtgtaagattgtgtaaatctttccatagtaaaatgaattgccttagctttcaggaattttattccttacccatcaagctcccagtatcaaataaagtaatatagttgatatccacctcatttccctgttaagacgacagctaccatctatctaacgatcagacatgtgatacattttcacaaacctaggaatcgtcactgaactttgtatattcagagcctgtgcctgcttgtcacacagcacaggcattaaatgtattgtttgtttgtataagtggatgaatgaacaaatagaagagttgactattatcccaaccatgtaccctcgggtccaggaatcagaaagttcaataaggaagtaaagcacacaacattcttttgctggtcttattggcctagagtatttattgtgagagcagattcacagtcattgtttgacagaacagtataaatagatgggtagccgccgttggacctgacgtcactaacgggaaataacaacgcagatgacgcttctgatcctctgcaccacgcactgccaccagtgatgaaatcctgcttctggcaaacatgaaacagttctagtaccatggcttggcagtcgctcccgtgtatagaagcagcagtagccaaccggagccggttgaacatctcaaaataatcccttatcttgttgcacttgaaaatagcatccatacagagtaatatcttagagaagtggcagcttagaaatgaactcctactgtgctttcagcagcttagggggaatttatcttctcccagatgggacttggagcaaagggatgtgacatagagcagtggccgggttctctttgatggaatgcggatgttcatgcagggggccagttctcatgctgtgccatttgcttacaaaggtagcatgctgttgttgggtttttttattttgtgtgtgtgtatgtatgtatgtatatatgtatgtatatatgtatgtgtgcatctatgtctacacctgtgtgtccgtgtgtatttgtatatgtgtgtgccctcagaggccagaaaagggtatcaatccccctggagctagagttagaggcagttgtgaaccatccaacatggctggtggaaactgaactcaggtcctctgggagagcagcatgctctaagccagtgagccatccatctcccagccccagcgatggccaatgagaaagccactgtgcggcccattcacagagacaggtgtactggggtaccctaaatctaagtggcttgatggacaaggcattcatcactcaagagactccagcacaggtcacattggtcctgtgaccacagcagggacccaggacctgtaagctcacatttgggctgatacttggtgatacttgtctcgggtccactggccatagttagcgacgtggcctgcctgccagcaaggaggctgaaaagtgtgggactgagagagaagtggaagatggtgggcagaatttgtatattaaagtctactggcttgaggtgccctaagcccaacaccatagctgcagcctcagaacccacagttgtctaaccacatgtccactggctgtttcctatgccccaagcatgaccgaggatggctgattctcccagaacatcatttactggctggcataaccaatgcgtaacctttgcctgagaaggagaatgtaaacccatctttacatttcttatttaataaaagattaatctcatctgtggattttaagacggaagaacagttggatgaaactaagcactgatagttgttgttgtgttttataaaaagaaagaaaaagccagggatatgtttggtagaggtgccgtatgnnnnnnnnnnnnnnnnnnnnttaccagccatacaatgggtatagtatggaatataatttatttagggcatggcaggtgagttgagggagggcagggagagagagagagagagagagagagagagagagagagagagagagagagatgggggcagggagagagggagaaggagaggggagtagaggccagccataaacacctggggtggggggatgggaagagaagggacagagagggagagagtaagagagcaaggaaggggtgaacagccccttttatagtaaaccaggcatacctggctattgccaggtagctatgggtggggtggagcctagaaggaatgctaacagttgaaacgggaagttccccatagatatgataaacatttgccaaaccagtgggtatggtaaacacttgccaattatcggtagtggtcaagataaaagcatagttggttttcctcacccccttcctctgtgctgccaatcacacccttctgaacagtttttctcactgagaaagaaaccagcttgcctggtagagtaatcacagcacccgggaggctaaaacaggagggaatacccttggctacagaatgagatcctgtctctaaaacagcaaacagcaaaccagttatcttcccttgccagggcataaccagtgagagaagttacatgtgtaagtgctgtggccactaattagctgtaaccctcaagtgggaaagccacataaacgcacaggcgaacgatcaggcgaacaatcgaatgaatgaacgaaccacacccaaggcatccacaaggggtgccccattcacaccctaaaagaatagagattagagcttcaaggtcacgagtgtcaaagggcattaaaccaaatgttccctccaggatccagatgactttaatgctcctcctcagctgaggcaccccaaccctgagtgacacccttcatcacctgtggccaacactgtcctgtggcttcagtcttcactcggctgttctgacgtctgcagacatcccttcccctgagggtgggcccagttttaggtggatggctacagcctttgaccctttggttttctcaagctctgttacagagctctgctacctctgcctgaggttgtgtggagggttttggttttggttttggttttggctttggctttggttttttagctacctcctcacctgtccagttgtctactttcttcttgggcacactgggccacacatacacaagacacacttcctctactccgcctctggttgtattttttttaacctgtaactatattaaagctcattgagatgtgtagacttctggtctggttggttaactttggtgtgtgatgctttttttttttgcaaaatattttaataataaagtttttttttaattggaaagatgaaaagtggaagaaggacaggaagacacctgtgtagttttttgcttttttttttttaaacaactttagtttactgggagctcagcgtgcctttgacataggatggacctaaaataatattttcctccaaaatcatttcctgagttttcattgataatataaaattgcttaaggaccaggaatggagactaatggttcaaagaaatatgcaacaatacaaggaaaaagacttttaatcgagcagaattgattgatgattgccttgcatctacagtaatggttaatttttttttcatttttgaaataatggtgtgtgtgtgtgtgtgtgtgtgtgttacatgcatgtgtgggcacatgtgtatgtggttatatgtgcatatgagtgtgttccaggacaccaaaggcaatgtcacatgactttctctattctgctctaccctgtgttttttgagccaaggtctcttcattgaacctggagctttaccattgcatcgaggctggccaggaggatctacctgcctgtctccatgcacaccaccagcccagctctggggttatatgtatgatgctgcttctgtgtctggctgggccactagggcttcaaacccaggtcctaatattcatgcagtaaacactgtatctgctgaaccatctgcccagcctcctaaatctctgtattctttcctaactggaggatcttgctgtttagtacagttattctatgaagataaaattagaaatgatttctcttcctggccacttaagtgccagtgtaattaatgtaccatcctagctgttttgttttgcttgtactgtaaagatacaagtcttttagatattaatgaatttccctttttagcagtaagaagaaaactctgtgtacaaatgcatttgtcattctcccgagtccatgttgttaaaatgtgcagtaattttcaccacctggactggtgacagcacagttcctaagtagaccagccatgtagttggtcacataggtaaaattttaacaatgattcatataacctagtcttcgcaaaataccttactcatatatttaatacttaatttctagcatgttctgatttctgggtgaggagattttaatgtcaggaaatctttcatacgttggtttgtcttcagcgtcacaaccccaccccaccccacccccacccccgttttgctctgccctttacagtggcaggtagggaacttctcacgtgtgcacaggggactcggagcaagtcaatatcttggaaatgtacaatgcagctttctgcttcctttgttcctgaaatagactgaaggattccccttcccaccaccttctggcaacatattccttcttggtttaggtagccaagataaacgaaaaggtctctgtaaccctccatgggttgcatctatttggtgtttgctaattttataactgcatcattgcgttcgttgttctggagaaagtcgcctctggggtgggaaggaaatgcttccactcaaagcctccaaatccgctcttctttctttttttttttttaaccaagcagctgttcgtacagcttaggcattctgaggaagtggctgaataaaagtgtaacggttccgaaatgagccggcccgatgccgttccagcagctagcagctgcggagatacgatttctgcaccgcgggcggggacctgcttttctgggttaatctcagcatttcacatttggcggacactcaagacccttctgggttttgttgttgtttggatttggggatgtgcgttttgtttggttagctttagttctgttttccgtttatgttttgcggccttagataggtgcaagtcgttgaagtgatttttttttttttttttgcatcttatgtttgcgtatttttttttccgaccatgtgtctgtccctggcatgtgtgcgtgagttcttaaaaatgcgtgggtgtgcgtgttggagcagatgtaagtacatttgttttcatatggaggcccaaggttgagtcgaaaatctttctctctttctgccgatcttattcaccgaggcatggttatttgactgaatacatagcttgacattacagctagactaatagccagcttgctctgaaaacccccccttcttgccttctaagcagaaaggcaggcaggccacctggcatttgcataggttttgtgactctaaactccaagcctcctgcgtgctgcttgtacgaggagccctttaaccagtgagccacctcccctgaccttgtgttctgatttaattaatgatctccagcaagcagacatataaaattaaactattataacaacagtccccacaaatacgtttggatgacaagtgcatttatttttaatagagttgagaggcaagagtattattggggttctcggggtggagcattccacctctgcacgcgtgcattgtctcccctggtatggtacatgtgtaacaacggatgaagatgcatataacacaagggttcattaccatccaagtcacagttgttgttaggagtattgtcaacccgagtgacgggacaaggagaaagcagtcattgtaagatcttagaggtagcccagatagattacttactttttattgcactaaccaactacctaacagaactcacactaagagggagactttattttgcccagtagtttcaaatggttcagtccctggctacctggtctcatactcttgggcaccagcaatgtgtgctggcagtaggtcctttcttcttagacaggaagtggcactcatgaagttgccagggctacaaggacacatccctggggacttacttcctgagttcttttcattgcttcctaatgctattagtattacaaatttctaggggattgatccattccttggtcagagccctcttgatctgctcatttgtagaaatatcatcacagacacgctaaccccttagcccagcggttcttgacctgtatcaacattacagttatgaatagcaacagacttaatttcatgccttagagtgactacaacatgaggaactgaattaaagggtcacagcattaggtaggttgagaaccatggctatccttcatccaacctggttgacagtaagttacccaccatgatagagcaatgttctgttccttctgggtggacctcggttgacatagccacttacctactggaggacatcttggttgtttccatgttttcatagttgtgatcaaaccgctatgagcttcaaacaaataatcaaatgaaattgtaatacttcggtattgacactatctcgctgatcatgtagcatcagcaagtgcaatctaaaatgagttcattatcttactgagggtagtctagtactgtttttctggcttatctgtttctacaagtggtgaagaaagacagttgaacagattatacattaacaggtatacaagcagctacagccatgactgagtatgtggggcacataaattaaaaataaaaatggccaaatgtttttgagaacgaatctgttgataggacaagaaaatgtccagggtttttgatgaggtatcttgacagcaagtgccctaactctaggacatccttaattcaatcacacctgcaggcactgtcttccttgttacattaggacccgaatctttgcaggctataacctagcttcccatttttcacaatcgtgcgatggttttcctgaagaaaagccaaagtatcccagttgagacctgcaggagcccattgtgtccccaaggtactatggggtactatggggtggtgtccttactaagcacaagtacccagagagatggaaggtactatggggtactatggggtggtgtccttactaagcacaagtacccagagagatggaaggtactatggggtactatggggtggtgtccttactaagcacaagtacccagagagatggagattcgtaaactctgtttcttacaacaacaacaacaacaacaacaacggggggggggnnnnnnnnnnnnnnnnnnnnnnnnnnnnnnnnnnnnnnnnnnnnnnnnnnnnnnnnnnagagagagagaggtgtgtaagcagttttatgagggaaacatgaggatccctggagccttcaacgagtgtctgagcccagtggcaggctgctctctctgtaatagctttatgaaggggcacattcagggagtggggggctcaccaggttgatgctacttctcaaccacttcccttccaacactgtgatttttttttcctccattgtccctaagattccccctcagaaagtgtatttgctgtggttacttcccccaagatccccctggagtatgcttcccagaatttagtcactgttcctcttggtgtttctctgatgatgccatagtctgctctcctgttgtccctttctccagcgaaacaccggttctaattcttgaagggaggaaactaaagggcgatgatcccatgttaacagacatgaccagactcaccttgataacagaatgtaagcaagctcaaggaagtctgcgtcagcagcagcctgttaaaatatgtgtcgccatgttggtgggaaacaggcctttaaccccaacatttgggaggcagagacaggtggatctcagtgagtttgaggccagcctggtctacagagcaagttctaatacatccagggaaaccctgtctcaaaacaacaaacaaacaaacaaacaaaccaaaaaagtcatgtgacacaatgttggacactatgatttaatgcttgcttgacctttcttcatgaatgtcatacgtcatagtgtaggccatgaaaatattccttggaaagagcaaggctgttgtgattccttcgactgtgttaagaggacctaagtttctctttgtaacgtggggcattggaagaatccagggaggcttgatgtccaacatctcctgggaccttgatcatctttaagtctacagggaagtaaagaggacaagatgagcttgtggttgaaccctggatctacatagttgtccccactcatggtagggcgagctacatgctgatacttgagtgaagcacgcctgagattgctaatagcatctccattgaagttattgggagtggtttcattggaatggtgcgtgttaaatgtgtataatgcagcattgtagattggcgtttactttctctctctcatgtgtttccttaagtaaggcacatttgtggactgggagagtttaacggctctctttcccatactaccctaagtcctcaagcattgtagcacagtatggccaattaaacacttcatgggataaccagtccaccttggatatagaccgaggtcctaaattatattttatatgacagcgtctctctgcgttttcatccccctggacatctcaaattgcagaatagcatatttcgtccagggaaaataaataaataagtggttatgttgcagactgttgctaatggcatttggacactctgtaacatgactgaggattccttggcgatcacattgatgaccgatgccctctaaatgttaccttcagtcaaattacctgagtgtctgtatgtttgtttgtttgtttgtttgtttattatatgtaagtacactgtagctgtcttctgacactccagaagagggagtcagagctcattagggatggttgtgagccaccatgtggttgctgggatttgaactcaggacctttggaagagcagtcagtgctcttaaccactgagccatctctccagcttgagtgtctgtatgtaatgaatatgcacagctagctgtgtctgtgtgtgtgtgcatccagagagagagagggggggggggagagagagagagagagagagagagagagagagagagagagagagagagagagagaggaaggaaggaaggaaggaaggaaggaaggaaggaaggaaggaaggaaggaaggaaggaaattcttcctgggatgcctgtatgtgcatggcatacatgaggaggtcagaggtcagtgcctcatactttccttcatggttgtccacctttttgagacagggtctcacttaacctggtactcactggttagctacagtagctcacccctcaccccagcactggggtgacagatgtaccctgccctgcccagtattttatgtgtgcctgggatgcaggctcagttccccattctctcacagtgagtgcttagtgactgagcctcccccccccaccccccgccccttacattaatttcaatggagagatggctccacagctgggagaaccagatcatcttccagagcacccagattccattcccagcgtcccacaaggcagatcacaccgtctgtaactaaaatctaaaggatccattctctcttctggccttcgtgggcatcaggcatgcgtgtggtgtagagatacatctgtaggcaaaacacccatatacataaaaataaatctattttaagtagaaaagagaggcttctccctccccacactgaaatgctgattgtctgcatgtaattgcatcctgcataatataccctatgatacacacaatgcccatcagcgccttcttccacatacctttgcacagcacaccctgtggtatataatgcgcatcagacgtagggggtggggggctannnnnnnnnnnnnnnnnnnnnnnnnnnnnnnnnnnnnnnnnnnnnnnnnnnnnnnnnnnnnnnnnnnnnnnnnnnnnnnnnnnnnnnnnnnnnnnnnnnnnnnnnnnnnnnnnnnnnnnnnnnnnnnnnnnnnnnnnnnnnnnnnnnnnnnnnnnnnnnnnnnnnnnnnnnnnnnnnnnnnnnnnnnnnnnnnnnnnnnnnnnnnnnnnnnnnnnnnnnnnnnnnnnnnnnnnnnnnnnnnnnnnnnnnnnnnnnnnnnnnnnnnnnnntaagagtcaaaggatagctattgtcactatttctcatttgtaatttagtctcaacatgtgcttacctggtgtacgatctgctatgtgtcccagtaactgcccttagaaaatggtcacatctgtgctagtgtcttcttgagatttctttctagaaaaaaaaaaaatgctcacagcatagccacaccatcaccaccaccaccacccactgtggaactgaagtttttacagagtatcagcagggaattcttatgtgacatgggcaactgtgggccgtttgtattttctagaatgttctcactcatgaagcacgtagcctctacccattcattcatttgcaagtgtatgagctcagagtgcatgtgcatgtgggttttccccgagttagggccacacatgcatacaagcaaagttgacctccggttctttccttaattgctctctatttattgagaaagggtctctttttttttaatccaaaagtcacctgtcagctagtctggctagccagcttgctcaggggatctgccgtctgctggctgagacctgggatttcaggtggctgccatccatgtcctatgtttatgtaggttctgggtatccagcctcaccctggtccccacttttgttccataagttctttatccatcgagccatttccccagctccactctaacccccatattatcttctaaagaaaaaaatttaaaaggccactctgaaatccgcagagagtgctccctatcttgaatttagacccagttctgtaatcttttatcttggttccttttcttacatggcatcccttcatttatttactttctaagggataatgaactctgtaacatctcgttccataatttaaaaaacccaaactgttacttgttttgcccccacagagtagaataggatgtctccaactgaacatgctgaactcttcgcagtacacaaacgaggaggtctttggtaggagcccagacgagctcacccacagggtttgctgaaaatagctgtgtgctttccagttggccggtcctggcaggagctcgctgcttatcctatttctcaacagtgagtttaaaacattcactccatagcttcctaagcattcggtgtgaacttgcatgagcttcctgcacacggacgtacaagaggtctttagtccccgttttcttggtcgcgagaaggcccagagctaatgattaaaccaactcgttgattctgcagctgggaccagcaccccaagctctaggcataccctaatcccgtaagacagtagtgtgtctcaatctgtaggtgtcaaccattttggggttggtcgaacgatcctttcacaggaataacccaagaccgtcagaaaacacagacacttacattatgattcacaacagcagcgaaattagttatgaagcagcaacaaaaaataattttatggttgaggtcaccacaacatgaggacctgtattaaagggtggcagtgttagaatggttgagaaccactgcctgaagagatctttccctgtaccccattactggtacctgtatacctggcctttgtatttctagtgggcagtggctttcttccttttctcttgctttgagccatcagtacaagacatccaatgcaacagaggtgagggtcagggctaagcagtaaagtgaggcaccggggtgcaaagtttaagtaggtgagtcctaccatcattggccagccctgttgtaggctttggtagcctcatcctggtgggcattccaaacagctgactgcacatacactcactgcaatcacaaggatttgtctggttgtcgatcgtgatccttagaaaagaaaaacgataggggagttagcgtttttctccccagatttgtcctgtgttttgggacatagcaagtttagcacactcattctaattgtggtgacttgatcattgaaacctactgacagggatgtcttttccctttggccccaatccccttgcccttgttcttggtccttcctggctttgatggcaagaccgctgtgtgcttctgactagagcttgacgcccggttcagtaactgctttagctcttatttttaaacacctcaggcaggcaggaagctcacctttgatatggatctctatggattccttacagccatatgagtgacctgtctcaccctacgttttacccagggagctttggtgttgtttatttaagtattccttgggcatggagggaaatcatctggaagataaaagatctggaagacataagatctggaagatataagatatgttattcttcaaataagcagttaagtcagtctgtttcatggtacaaactaaaacccaagtgactggagttacagagttcaagtgtgagcctcttccttctcccctggcgctccgaggaagggctaggagttacagagagatgggatcatagtgaccaccaggagtttcatatgaaattgccccaaaatgggaaaggactccttccagagtgggaagggggtgggattatacagtgcccacctctactgaaaggacacttaacagtgtctggagactcgtttgattgacctaacagacaagctggtatggtatctagtagaaggaggagatgcttgcaaacacagtcaccacccccattctagcacacagaagactctcagccaaaatgctaacggtgtcacctacagaagtccccattacagtagcatttattgaacctagttgtcccatttaataacaactactgtgcacagtgcagccatttttatccttgctttatggatagcattgacctttggcgtagcaactaggaaacttgcctttgcgtatgaatctggtctccgtagatatagggctttgatgtctggaagtccaacctctgcactgcagaggaagtgagctgcccaccacagtccaaattaatagggcaggcagccactccagagaggcgtcaggagacatgactcctaaatgtgcattggtttaatgactggagttctctcttaaggatcacatcctctgagtctattttaaaacgggatttgtcatgttggttccttagccaggcagatatcccttggccacaacaagcaaaatccctgggctttgtctgtgcacctgtgagtcttattcctataaatacctcaaccctattgggccagcgggctaggcctccaaataggcaaccagaatcacaccccgcccttgtctcctccacattcctgcccgtagttatttatagccacatgtagaaatggatccacctatttcttgtttgggagaataacagaggctggaaaggaataggaagggaaactgaatctttatccccgtgtttcccaaccttcctactgactgctgtaaccctttaatacactatctcgtgttgtggtgaaccccagccataagttatttcattgctacatcatatctgtaattctgctgctgtagtgtaaatatctgatatgtaggatagctgataggtgaccccgaagggggttgtgacccacaggttgagaactgctgctttatcctgttatgattctagttcacggtcaatttgtaagcctctccctcctatagattcccaggttcttgccagctctggccccagatcattagcagcaagtgaggactttttgagacatactagcctcagcatctgtctgtcagagagctgatgtctaagctgaggtgtgtgctatgggcgtagaatatcacagtgactacggtatagcgcctggcatcttacagatacggtgctgttctagaaagactggaagatggcctcgggtcccaggagggtatagagatcactaagtggtctttactctgtgcctgaagtgacatctatctactacagccccaaactgtctctggatccttggaagtccttagctgaagtagattcctctcaagacacacaccaaatgagttaatttcccccaaagccttgaaaattctcctccaaacactgtgtgtaaagaagggaaatctctcttttccgtgtttctttcctgacttaagaggaagaagttctaaatcttcgccgagctttgagggaaactttttaattacctcattaatgacctgacttgatgatggattttgtgtctttaaacagtgtttctgcttcgtggacctcttaaaaaatgtgaaagctcacttcttacacattttaaagttgacatctgtaatttatcagtagtaataataattgagtaatttagtccaatagttgcaaaagctggctaactttatgttgagtgatgcttgtgtatttcaaacctagttcagaaagtacccaatatgacaggtaggctagtcccatgattgcagacaccacttattttgaggaaaatatctactataaattgaattagcaaagccattctttattgttaaactaattgaccatgtcggagttattttctggaagaagattcctgacttcatcttttaaagcaagtacaaagaaaaatcaagaggatgcaaaattattattgatctgtgaggttgtcacctcagtaaaatgaggtgtgttctctttgtttcccgttggcccttcatttttccttataggtgagaatcaggctaagaagggctccttctttggaaagcccgaggctccaggaagcaggcactgttctctggcacagcggcgatcccacgggaggatctaggtggtctggttttgtccttagtcaggtggcctggaaattttgtgtacgtccccagggtatgcatgttcctgttcaaagaattctgctgtcagagggaagggtaagaaaaataatttaaaatgacttagttcattctcttttctcaagcttctagtctcctcgtctcattcatatgtgatcatgcaagtgaggagaggacagacccaggactatgctcatggcaaatatacttcaggttgtgtttgcttgaaattcacagccctggtgctgtaccttccaagaggctgtggaggaggggaggcagcatggtcagctagggttccctgaagacgatagtatgtcctcaagactgtgaactgtcagtgcccagctaactgggttcatgttccggctgctgccctcctgttcagtagcccacagaaggcctccctcttacccttctccgggcagtgctggcccccgtgagtgagctacatgggaacttacattccttgcggtcttgaggctctccctgtagctcagctggactctctcccctgcaaactgatggagtccactggccagagatgtgactgcagccaaaacatgaccagaggagaaaagagacctagaaggatctacctaggatgccaaagctcatattacaaagcttgtttcgtagagccctgaggaaaagcgaattagtgtccttgcataaacctctgtgagtctaacttagcgtcctcagtcatgaaatacccaaggatgaatgaacaccctgcccgcactcaagctactatgtcatacacagtttctggctcgcagttctccatatgtccaaaccatttggccagccagaaaacaagatggctcattggcatctcgtgcactgactgtgaggaagggcctttagtgtcaagcacgggaatgaagcaaaatagtaaatgatactgaacccatcatatgcttttgttcattatcccctcaattcatactgcttcctgacccttcgttgtttactttcgctattcgctattagttacccacagttattctattccttggtactgaagtgaagagacaagacccagaattctcctttccttactcttacatacccaatatttaaactggcttccaaattatactttaaaacttcccaagtgaagtttgagaccagtaccctgagaaggtcatactaaaattgaagacaaacagaacctcagcactctacgtccatagtcagtcagtcagtcacagtgtgagagtatgcagcaacacactgtcatttagccataagggtcagcatccgaggggtggctttgtaacaggtagagcttgcagaaattttcaccttgttttctgcaggttgtattctttgaaggttttttggttttttgtttgtttggttttgttttttgttttgatcttgctctacacggaggtactgagggaaggatgtaagcgcagagctcagacatctctgcactgtgttccacaaggaaaactagctttatagaaagtgtctcccaccaggaaccatgtgccactagatagcagtgaagcagatactccagtgaactgtgaagccagactgtccccccagatcacagaaggagacagagttctcctccctcggaaaagatgcacagttatagattatagttatgaacagttatcagtagattatagttagtgttccttggccttgcctgattaaaaaaacaaaacaaaacaaaaaaacttgtcttcacaaacagggacagggttataaggaccatcgagtcttggtttcccagatagctgtctgggcaatggggagagagacgccgccatactttcctatggtgtagactactacctcttgtcttccatattgcgtatgccagagtgaggatgggagcatcggtcttagaggattagtcacaagtggggacaaggctccagctttaatcaactgcctcaacctgttgcagcccagggggggtgcgtaccaagccttccgttcctggaagacttaaacattcctcagctgctctcaataccagcccaccttcccagaatgccgttcctgaccgtcatctcctgtttaatgtccccactgcctcccctcacataaacaagcctcatgacgcctttgggactctgccgaatagatctgatggtcaacttgatacaacccagaacccccacagaggagagtcttcgtgggaagttgtttggatgaagttgtcttatgggaacatcttgggggaaggaagtgtgctggcaagtgatgtaggaaaaccccacctactcttcgcagcactagtccgtggcaagagtcccgcaaatgctcaaagacatgtctcccctacagttattctggcccgtggcagaacagagtattctagggattccacaacaggccatgcagcctgtcacagcactgtcacagcactgtcagagcggtggttcttatgggccatgaccgctttgaggtcgaccaactctttgacagggatcaccaaagaccatcagagaaggatttacgttatgattcatggcaaaaatacagttatgaactagcaaggaaagtaatggtgtggttgggggtcatcccggcatgaggaactgtattaaagggtcacagcattaggaagggtgaggactgctgtgttacaaagaggctacagggtgcgtggatctgtacacagagtggcactggccatgtgggttgtcctactcaaagtgatgagagatatggtatcctctgtctgagagggatgaggagatgttttgagcttagaagtactgtcccataaggggtttggtcctcagagtctgcccagcatccacaccctccagttgacttcatattgaattctgattaccaattgcttatattgtaaggatattgttcctgtgtccctctgctgaccctgcatctggagtgcactcagtgtttaaggggagagcaagtgagtactctctagtcacctccagccacccaccggagcatagagggcattagggatatcatttccctggtctcagagctgagaaccctgagcagctgggacctcatttgagcccatgaagacccagcgcatactggcctagttatgtccctggactgcatccagactgcaacggcagggctgctcgtctgccggcacagttgttgcttgctccatctacctctctgtgccttctgtttgtgttttcaagaaaagcattccttaaaatagatgttcttcctgatggcgggagagctggtgtggggcggccatgccacctccccgactgctttcactggagcctgttcaagtcctgggagtttgctgtgagactgtgttgacatgggggcctagtttgttgtcacaaataggatgtctccaggatgcaccttcctctgtttcagtgggtgacaaatttcaaccctaccaaccaaagttgagaggccaggagccagcagtatgggagccacttaagtcgccgtgtgtgtgtgtgtgtgtgtgtgtgtgtgtgtgtgtgtctgtctgtctgtctgtctgtctgtctgcctgcctgcctgcctgtgtctgtacatgtcagcacagtgttctcccacttcacacccatgtgtgtgtgtgtgtgtgtgtgtgtgtgtctgtgtctgtctgtctgtctgtgtctgtacatgtcagcacagtgttctcccacttcacacccgtgtgtgtgtgtgtgtgtgtgtgtgtgtctgtctgtctgcctgcctgcctgtgtctgtacatgtcagcacagtgttctcccactttacacccgtgtgtgtgtgtgtgtgtgtgtgtgtgtctgtctgtctgtctgtctgtctgtctgtctgcctgtgtctgtacatgtcagcacagtgttctcccacttcacacccgtgtgtgtgtgtgtgtgtgtgtgtgtgtgtgtgtgtgtgtgtgtgtctgtctgtctgtctgtctgcctgcctgtgtctgtacatgtcagcacagtgttctcccactttacacccatgtgtgtgtgtgtgtgtgtgtgtgtgtgttctcacacatataaagtgaattggaataggagcacagggattcaggaatttcactgtggcactttttctttgattttagtggagcaccatatgaccatcactctatgaagttaacactttaaagcatttctccttaaagccagaggccccaggtgctgaaatgtgggcctatgggatatgggcagcggtgaaggagtcccttgcaacatggagtatggggagaaataagagcgaccatacagcatgcagtggaggtgcaatgggggctagtgcaggatggcatggttggggcacagtggggctcatgcagtatggggtatggacagaggtgaaggcaaccttgtgtagaggagccctagggggaggggcagtagggtttgaagtgcagggggcttctatagtgcattcttggaggtggtataatagaacttgtgcagtgtggactactatggaggcccgtaacaggttcatgggatgcaggtacagtgagtttcatgcagtgcgggctataccaacttttaaataagtcctggagatccaagctcacttcccaggcttgcaatagcaagcactttacctgctaaaccatcccttcagctcctataagctcatgttaatcccagctcagtccatgtgtacacattacttacacatgtaatggaaaactgttcttcaaaacactgtattacctgccaggcactggtactttcatttatttaccattttccaatgagggctgcagtgtagctcagagttggagacttgcattgcatgcatgaggtcttggatttgattcccagcaccaggagggggaattttaaatcttaccaatgactaccggcatatgtagctatgagggtgtataggattatttctaataattgctgatccttgtaatatgtcttgccttagagactcaatgtggtccctgggaacccacccttcctggttcccaattactcttattccccagtagtcccctgccccactcctcagttttgtgggccaggttcacacagactcagttctcaaggaacatgcccactccaaagtctacaccgtctcctggtctgtgggtcagagcatcccttgcaggtgggtgctttagtgactttggatttcaccctgcagagaaactgagtctcacatattttaaagacaaataagcccgtgttcactgcaaggttgccatctctaaccagtgtgtgcaggacactggggtctccagtagggtttcactggagctgtggttataaacctggcctgaccgtgatggcatccaaaacccatggaagcatacctacatatgtgcataacgtaacataaatacagcgcacatttgctttaaaggctcataatgcgcatcctttaaaggggcaaagtggtataggagacagggcgggaagatctcaagttggaggctagcctggggtatataaatttgcctggctcaaaaaggcaaaagaggcagggaataagctgaatgaatgaatgaatgaatgaatgagggaggagaggtggtcctgaattgacttcatcannnnnnnnnnnnnnnnnnnngatgttctttactggcttgcctcacctggcttgctcagcctgctctcttatagaacccaagactaccagcccagagatggtcccacccacaagaggcctttcccccttgatcactaattgagaaaatgccttacagttggatctcatggaggcatttcctcaactgaagctcctttctctatgataactccagctgtgtcaagttgacacaaaactagccagtacagcatccaaaacccatgggaagcatacctacatatgtgcataacgtaacataaatacagcgcacatttgctttaaaggctcataatgcgcatcctttaaaggggcaaagtggtataggagacagggcgggaagatctcaagttggaggctagcctggggtatataaatttgcctggctcaaaaaggcaaaagaggcagggaataagctgaatgaatgaatgaatgaatgaatgagggaggagaggtggtcctgaattgacttcatcagtgtttaatgagtgagcactaaggtctctatatttattcacttttccaatggtgtaattaaaactttcttttacctggcatgcctgtcttagaggctccagtgaacattctcactgtggaaaagagcataagtaattttgttactcacctgcatgtcttcaccctgggggtggggggtgggggaatgagtaatatttgttgaaatggataccattactacctctacagatagtcgcaagaaacaccaggtttgcgtgagtggcagtttgggttttgtagcttattgtagtcagcatgtttgatggaagtggttttgtgttgcagattactaaaaaatgactaacctttttatatgatggctttaagaggtcactctgtggcagtgacggccacagactgtctttgtcggcgtctagtcaggagcctctacatgtcatccatccctgatttctgtctgtcacaaacgcgtgacagaagtgcctttgcgtgctgtacacctctaaaatcaaggcctccaggggccttactcacctcttcctgcttcttctgtgacatcttgtgttggggtgacagactggcctgactgaggctctggattagtctccaacacttaaactaatcaatcaatcaatcaatcaatcaatcatcatcatcactcagctgccagaactctccttggtttgggaatgttttgagacctgaatttctcatacaaacacatcttcattgacagatgaaatactggtttaaagtccatttattctgaccatacactttctcacacttgatctctgttttatttcaaagcttgttttccacttccaactctcctggtgtaaatcagtaaaatcctccagtttccttccttgatgaagcatctttatctttgggtgtttgagaaacattgttgccatgccaggaggaaacctgaccacagggtagcagattcccccagcatggcccgccttggagaattcagtaaacaaattgataatgaggtagcatgaaatggggcatcaacagaaaccccaaaagtcattccaaatcatatcaccataacagtcccacaactgggatgcatcatcagaagagaagcatccaaagagttggtatgcacttgtcttgctctccagcacttactcagatgcacagagtgtaggttggggcgggctcggagaccactgcccaggcaggaactccatcatctggctggtcatacagcactcgggtgcaagtgcctgcttctgctgcttgctacctaagcacaaaacagcctgtgttggacgcacatctttgcaatgtttgctgccattgctgcctgggcttggctagagctgagctcatgtaggtagtttgaaactaatgtctttccagcaaaacatcaggagcacataaagatggatcctgaatttttgctaaactttattcaagctcacaattcatgagttgtctcttagatacccctgtcccctgatgagtgtgcactgtgtccttcaagtatcagtagttgggagagaggaagccacaaatggtactactgctcttctcacgtgcgcaattatggatgatagtcaacagatctattttgtttgcttggttgttgtttgttaactgatatttatacagctctggaatgtataatgtcaaccaagtagaggacagatgagcctgctccagagttccttatacgactgtcgttggtgtgcgtcagggtggctgtagatgcgactgtaagctaggcagaagtactgacatcatttttcaggccttctgctgactgctgtttcccagtgcagagtgtgtcagccagcaactcccttctagccttttgctggacaaggatcccgtgttggattgtagctgagaaaatgcaagaacccccaaattcctcaaaagtatttgtagctggggtgctggctcagtcggtagcatgtttgtcacgtgaatgaggacctgagttcaagccccagagccaatgtatctgtcgatcctgtaatcccagcactgggtaatcagggacaggtggatctgtaggactttgtggccggccagcctagcatgcatggtgagctctgtggcaatgagagaccctgtctcaaagaacgggacatcccgaggaatgacacctccagtatctctgtcccaagctgagcatgtgcgtgcacacaaatgcagagcgcgcatgcatacgcggatctgcagacattgaggtgactcgttctccaggcacatctgtccaatgctgagtttccattatctgtcatgcatcctttggaggagagacaagctggctctccagttaatcacatctttaatctatctagaaggaaagacccaaacttggaatacattatttctataaaccttgttcgtgtttacctgccgttctactgaatgggaaaagataaagtgatatctgtaaacgggaatatttcttagtaaaccaacccagtgcagataagggtttctaggtctccctgttttgttttggaggttttatttttgttttgttttgttttgttttgtttttttcagatagctgtgggaagggtttgatcctatgcaaagaattttccagcgttcatatgttttcatgaagtagaaataactgtgcgctagaggggggaggcggttgttttgatctgatgtgtgccccctgatttgtggtcctctgaacaccagaggccaagacaggtgctctaactgcaggacgtgtatgcgcctgctgttggacacactagtctggagccctgagctctgacttcctgggtgactcccaaagcctaagacaagaccagtgagtcccataaccaactccacactggtcccatttaagacatgaagaagcatgctatatggtaggtcaagagagcaaggaacacagcatatccaaaattacagacttcctccccagacatggattctccagtagcatacttactggatagaagggggggggggagaataacacttctttccctttttacaacctgcagtttataagatgtattagcagctaagccatgcttcttcaggctctgagctctcgggaagctcttgagtttatggcaggataagtacgtgttgaaatgttccaaacatttctgtcctgccttctttttttaatctgtgtccaactctgcccaaaccctaaatggccttatatgttcctcttccctgactggccacacgctcccagctctacaagaggattccttacccttcttttgggggggtaggcacagagtatcagtcacttaaaggccagatgttggagctgcacttccagggctgctggtgacagcctggagcctcatcctggccgtctgcctccatcccgcccccttcctgctgcacccataccaggttctgcatcactctcttctctgctgtaggacagttttacagaacttcgggccctcgggtacagatggcaacattaacactttgctttcttcttcacagacacgagacgacttcctgggccaggtggacgtgcctcttagtcaccttccggtaaggacggttcccgactctgggttgcatgctgggattgggggcttcagggctttacagcgcgtgtctgtagagtatgacagacatgacaaaggggctgagacagggagtgtgtgctcgggccatggctcttgctagacagcgtccctctggaggggtcggatagaggtcaatttagctgtcaaagtctccatctgagtcacatggctgctcttgttagcatctctggctcacctcccttatttctctactcctccacctttagccattgccccttatggaatagctatggtctcctgtccaggttcatcttaagggcttggtttttgtttccgtgtagtctttggtatagcttggtggtctttcccctttggttaaaatcgttacacctgtacaggctgccgcttcccagcctgtatgtttatgactttccaattggttggagatggaaaagaagattctgttggttgtaagtgtgcctgttcactgacggtgccaccctcacctcagaatgttccaggttagcctctgcgtctccgcctcccttcctccctgctcagtgagaagacggagggggctgtggactgtgactgcagtttgggggagtcacctgcaccctgtgtcagtgtaaatagatggctcatataccagctgccattcctaagactgttccgtcccccccccacacacacacaccctgccacctctcctccccacccacccctcaccccccaagcagctcaaagtgtcataagtaacagctatgagaggagaatcaaatacttctgccttacaagggcatcgtgtgtttcaacccttgtgtgagcacgtagcataaatagtctataaactaaagtgactgggaggagccagtacaaacctggtgtgtggaaaccggggctgtttccgatggcgagtgctaggaaagggaggctctgcagatgtaccatgaaggaatgcagtggcaagccatgatgtcactctctcttgagatgtcagctaaggaagagtcttcaagaagcaagcacattaagatacctgtgtttctatgtacagagctgaaccccaggtaccctatggttgtactgcgtaatgcttctatgagaaccacatccgaaacctagaattttttttacacaagggagggggcatgagtacatacccacagatgcagggacaaggtgtccagctcccttggagctcctgtgagccaccccatgtgggtgctgagatatggactttagatatggacgtcctgatagcgcaggaagcaccctgaaccactgagctatctctccagccccaaacaggatgattcttttcaggcctcactgagcatctctgagcgtctcaaaagctgcacagaaaactgtcttagttagggttactgtggctgtgctgaaacaccatgaccaaagcaacttggggaggaaagggtttattcggcttatgcctccacatcacagttcatcatcagaggaagtcaggacaggaattcaagcagggcaggaacctagagccacaaaagggtgctgcttactggcagctcctcctggcttgctcagcctgctttcttacagaaaccaggaccaccagctcagggatggctccacccacagtggtctgggccctcccccccatcaattgctatctaagaaaatggtcccagaggcttgtctccagcttgatctcatggaggcattttctcaattgaagctccctcttctctgataattccaaaaggcttcaggcattcctgactctgtgggcttccctgttgtgttcttcaggttaaaactggaaagtcatgctttgagacaacgttaatcagttggccatttttcatgtggcggtccccagacactctcttccctacagtaagaaccatgcatttgtcaagggaagatattgactcatagtctttaggagtcataagtgaggagctggagagatggcttagcagtttagagcatttgctgtgttcttccagacaacctgagttcagaatgcatcacccacgtccaatggctcactgacacctcaagtccaactccaagggtcctgagatcttctgggctctgcaggcactcgcacatagcacagatacgtctacatgcacagacacaggcacagacacatcaacatgtgcagacacagatacatgcacatgcatagacacagacacatgcacagacacatgcatagacacagacacatgtacagacacatgcatagacagacacagacacatgtatagacacagagatacctggttttggtttttggttttttgcttgtttgtttgtttgttttacatccttaaaagttaaaaagaaatgctgagagtggaggcacagtctgtaatcccagcacttgagaggcagaggcaggtcatctcttcaagttcgaagccaggcaggactctgacacccccacctaaaaaaacaaaaacaaaaacaaaaaacaaaaagagccataagtgaaagttccaccgccttcctccaggatgccctcttttgtgtgatttaggggtggctggtataaaaggcgtcatgcttccagtgaatagaggtgtgttctttacagaccaattcagtacagggaataactgggctttgggattctgagtggtaacccgggtaaactttcaaagaagtcagtgccgtcaaggcccaacatgagaatagaaaccagctcattaagaagatcactgtgtgagcaaaatatattccatgaatatatgaatatatgaaaagggcacagtggaagtcattatttcatataattaacatatactgagatttttatttttttagttttaagatcccacagaataaacaggacattcttctggttatggaaaggcccagagagaagcctaagttatagcaccatagcccaataaagcagtggttctcaacttcctgcactgcgaaccccccacccataacattatttcccgtgctatctcacaactgtcattttgctactgttatgaattataatgcaaatatctgtgttttcgatggactcgggccacccatgtgagctacctccaaggatatggacttcagtagaaagaagaaggggggaggtgaaggtagatcccttgtgctccgtgtggtagtagaagcagttaattctgcatgtacttggccatgagaccctggatttgaagctattacatgtatatttggcagtgtgtttaagacacttgtgggaaaattgcaccagggttcgttctgtgtgctaaggcaagcttagaatgtgttgttcgtgttcactctatttggtggcgtttcatcttgacagctacatagccattgctattgaaaaggtatcagctcaggacccccaagataagttctcagcacaaagacgatttattggcctcagagggacagaggacagggataagggataaagacaggagatagaggaaaagggagaaaggtgggacggggaaaagggagcaagggagatggggaagggtatttgcaatgaggggaacaggaccaaggactgcctctggataaggaagagacaaacatggcacataggaaaaatggcagtttataaaggtacaagggtccccccatgtcaggatgaggtgtttaattttaattggacatgttaattagggtagccaaagggggctttcaattgctggacttgaatgttttgatagctgggccttggtggtcatccccaggaggaggaagtcaacaaacttgggaatagaccctggtggctagctttaggtatgtaatctaacagattttagcaaggcagggggagaaggggaggaagaagggcaaggcctgccagagccatgctcaccatgcgcaagctggctagagtcccttccactgtggttagactctatgtagcctacagatgcaacagttgtcagaagcatccccttttaggtaagagaagataagaagatgaaaaatcttttagtcgacctaatggggctaagagatggctcggtggttcagagtatttgctgttcttatgaaggaacttatgttcccagcacccacatcaagtgcctcacaacagcctacaatgctgacttgagagactacaagcccctcttctggcctcggtgcacacccatgtgcacatacaggcagaaatgtttacacaatggagaagatccatggagatctggagtgtggggacagtggccctggcagccacccctcctggcctttttaaggactaaggagcctgactaagtatatggctattaattgacaatctagctgcattagcggctggagaattcattccctgaatgaatatttactggtaggagggattctggtcttggtaagtgcgtcagcaaagccaattctctcttgtggagctcagtgctggttttatggcagccacataccagtgtttgaaatgccaccagtgtggtgacagaacccacttacaagtatttgttattttcattaaggtttaaatgtaagccactttggcaagcggctattaataccagatgacactttcaaaaattagaccagaattccctcctttgggtccaacgtggttctcatttgctttttccctagatccatactccgctaccagggcatccgtgggctagggatcctaaaacccattggaaagccttgtcagtttctttcttcccctcttgctcacaccatttctctgtaattccgcacataattataccaaggtatttaatttcaattatgataaaagccttcagaattaagatcatagaaataaaaataaattggttttttttccaaatccaaattgacggactacttaattacctgttcctccatgttaacatatatatatatatatatatatatatatatatatatatatatattcagcttttaaaacactattattatgctctctttatttttcattgtgcttggtgctacatgcttctgccatggcacttaaatggaggtcggaggataacccagaagaacagcctctctctctacatattggccatggggttgatctgaggcgatcaggcttggtagcatgtgcctccacccactgcgccatcttgcacatcctattaagatatctgatgtacttggagtggtgtagtccctcctatactttactgctctctccttttccctcctgtgagttagcccctgttttcctcctagacaccacagtgagagaaaatatgcagtgtttgcctgaggtttgattcaatagacttcaaaccaaattaatcagaaacaataaaagtgatttcatgctgattaagtatattccttaggactgtatttcaaactagtgatgagctgctgtcttgttaattaggatagtacatctttattctttaaggaagcgttgtctcaggcttctttctgatgcccagcgtggcagaaagctctttggaaatcagggatttgatggccagggggaaggagaagtgaccttggtgtagatggctgtgaacttgctttaaataacttgaatgccccattttgtgtacttaatgtgtgtggttttgagagagagatactatagacctaccagctgaagcccctttcctcaccgacagccagtcacagctgttcctagcagataccggcacttgcaatatcaaactttgcctttagagtctcaggttcgctttgctgagcattttcctgtgtccatttgccacataagttccctgacccagagaaacccctcaccctcactcccacccccctgcccacagggtaatttagaggaccagtgtatctcctctgctgatgtacaagctcggagttacaaacttcagcttcgtggaacccacatctctgccacagtccattgccaatacctgagcacaaggattaattaagcagtgtagtgggccaggtggctgttatgtgtaagaccaaattggcagcctgccgggaggaaagtgcatgcacgctgggagccaagaggtgggcagaggagatggagacaaagctgctttgcgtggtgggtggtcactgcctgctagcccaaagcaggcgagggaggcagtgacagtagcaatccaatcacctcctttgatcatggattcctccaccctttgtactcaaaacaaagtaattttagaatcctgattcactttctgtcctggctgtagtcgcacttcccaggtttcagttgtgtagggacaaggaacggacgggaactgtggtttgagctgtgggggcagctgggacatctgcttccttctctccaattcctgactgtttatcttcagtatttattttcccctttattgccctttgaggaaaagactgaggcagagcaaatgtggggagtgaacatttatgtaggacagagagctaaaggaaacagccagagctctaagacattgccaaaggaccggctttaaaagatgaaaatctgcctgtcagatgtggtcaccttccatctgaagatgggggaattctctaaggttcctttctgggcccctgctttttcctacacgaggagagtgccctcagcggcaaggccaggttgcatcaaagcagttccagtgttccctgagcagaggctctgaggccttggtgacacacttgttacctaggagatgcaggctggcagcaggacggaggcctgcagaggagatgagaggctgtaaatgagaacagtcctttcgcctaccagctgctcacaggcacagccctgccagtgggcttcctgctgtcctcacagggccacaggaacagccttggctgtggccacgtatgattgctggtcctttgaaacgtctcttttcagacccgtttgctacatgccgtccatgattgaaactgggcatagtgtatcttccaccttctgattaggggtaaaaataacttgaaggcatccctgataacaggatgaagttctgacaggtgttctcccgttgcaccctggaaccttctcccgcctcttcccttctatgcctccctgacgcccccacagctcttaatgttctcatggctgccagttccggattctctggatccttgggcagtcattgcactgggtagagagacgctgttatggaaatgtaaatgtctccatctcagacacggttgtatccgtgcagcatgggctgactgctttcctagcgtggagcatgttcaggagagtggaccctaaggcagtctaggtggtagacgttcttatgttcatagccgcgggcagggtaacgatgctttctcgggtgtgcccatctcttcctgatctcttcttcaataccatctcttcctgagggcattttctaggtgaggaagcctgggtccagaggagggtgatttatcctagcaggcgacattgctgggcctgctactgattcttcagtactgaggtgtgcctacaccatggccaacagagtcaggaggagcctgaggctggggagtggccagtgggttttttaaggctgggcctttggcaactttctcctacatttgccttccagatggtttattttcaccacctatcatagagacaaggattctgcaaaaatagccattccctttaagacaacagcactgtccacaaaagtgcccctccctcccccgggtcccatagtgcagcatgcttcaagtcaactctctgcatctttctctgttgtggtctactttttgaggaagcgggggcgggggaaggaggcacttacttaaagatgttagggagagggaaactcaacaatgtctgtggaagaaaggaaactctagtcaagtgtgagtctcttctccagtctggaattcaccactgccttctctttggggaacactgcctttaaggtgaaaggttagtgttagagcaactgttctcaaccttcccaatgctgcaaccctttagtacattttctcacgtggtggtgacccccccccaaccataaaattagttttgttgctacttcataactgtaattttgctactgttacaaattgttatttacttatggtgacctctatggaggggaatgggggtagaggttaaatgacccccagggtaagaaatgctgggttagaggattttccacaaagagtattttgcacctgccttttgttgcgtggcattcattgagtctgcagcacctcaggtggagctggtccacgatgacagtggccaggactgtgcctggcaccttgtgtgggctgtgtgtagagcaccgtcttatctgattagtttaatcctcacaattcaggaagccctcgttgctacagacaaggacaccagagcccacagacagacagaaggaccacccagccctataaagtagtgaagacagaacatagacttggggtctgcttcttgctctatgagttttcttgctcgatatgtgaacagaagagtgttcagagccctctagtactcctcagctcctcaccgatgcccaccaacagccctgcaggctgttagtcttttccctctatcgttgaatttgttctctatccaaggctaggtgctgtggcagcccctcccgcatccctacaaccctcaggccaggcactccgatgccaccagtcttttccttgatgttgactaaaattactaaaaaccaacaattgtcggcattggtattctttctcaatagtttattattattattaatttgtgtatgtgtatatggacatgtgcatgcagaggtgaaagaacaagcttttagagttggttcttcactcccatcaagtgcattcctgagatttaaggtcttcaggcttggcagcaagcacccttgttgaaccatgtcactggccccaataataacatttcctgattaccaaggtttacatggtaagtaatagctattagaaattttatatagaaaataatcctcagatgtctaagagaatataataattgagtttttaagtgaaagttaatttttagggttcagtttttatagatcaaatgggtttatcaactatctaagcgcgtacctgctttcttttctccagccatcagtggtgagaaagttcaagttctgagctcattgcttcacttcctagaagctcaggagaaccacccggagctgactgatgtcaggcaggaggatccgtcagttcacgggcttcctgtcagggttagaatgacctatctgttcatgagatggctaaggcttcgagcatgaaccattgtcagggagatcgtcacagtggggtgaagatataaaacctagtcacatgggcgcaggaaggaattttcatatcactggggtaagaacagggcaaagtttgctgatagctcagaaggttgaagtgaaaactaaagtccccgagttcagtccccagagcccacatgaaaacagcgtcttccagagcccacaggactgacacaggcaggaactcacagagacagtgtgcataaagctgcacaagttcggggagggagggggggtggaatccccagcatggagaaggggacgtagacggagccctgtctctctccaagaagctgcatgcagttgatgccttctgggaaagagaaaaccaactttctccaatggagcaacgttgagtacatcaactgcactccagggcaggccccttgctgggaggagctagccaacacaaaacagatcccctgtttgtgtatgtgtgtgcgcgagttttggttcggtttggtttaatttgttatatttttatctttggggtttgttttgattttaggggtttcttaagagaggcagaatttgaagttgggtgtgtagggacatagtctctaggaggacttagttgggggcaggaaaggatatgatcaaaatatattgtttgagaaaacatataaagccaataaatgaaaaggcattatggtgtgtacatatgaatataatcgtatgccttacaattctagcagtgagggccgggcagtggtggctcatgcctttaatcccagcacttgggaggcagaggcaggcagatttctgagttcgaggccagcctgatctacaggacagccatggctatacagagaaaccctgtcttgaaaagcaaaaaaacaaaaaacaaacaattctagcaatgaggaagcaggcacaggaagataccctcacccccttaccctgggtttctgatcagccacactagcctaatcaatgagtatcagttcattgagagaagaaaaagaaggtgaccagtgcgtaaggttgtcctttggccagcgcacagtaggtacatgcacgccaggaaaagggggtgggggtggggaataagagaatccgaagccattaggaagaaaggatgtaaacagaattcaaatgtaaatacatactcttctcttcattctcttgacataatacatcattgtatgtggtttgcctctcttcctataaaagcaaatattttggattgcgtttaatttgacagatcaagtatttcaggtttgattacgtacaatgttttaaaaaataatggcacacatttcccccaatttcctgctttaatagccaaccaactttgcacattaaaatgaatcccaatgtcttaccaaatgagcacacatcccgtactattggtcgcttctctgttgctgtgataaacaagtgtggaccaaaagcaacttgggagggaaaggtttaatatggagggaagccagggcaggaactgagagcaggaactgaagcggagaccttggaggaagccaccaaactaagtttcttatctaagccaagaccacctgcccagggtggcacttcccacagtaggctggtacttcccacatcaaccattaattaaagaaatctcgggcagacctgccaaaaagctgatgtgatggggtgatccctcgctcagggtttccaatttccagatggttctagtttgtgtcaagttgacaagctaaggaacacagcccagtttcactcacagcttcatggaagagcccagtgggaggagtgagggctccctggatgctttgcatgggagatagtatcacctcaccttaggctgatgacttcatctttcaatgtgaggcatgcagctgcaccccaaggccaggccttgcattctgctaactctgtgtttaggtttcttcagtcccagggataatgaggcaccactgaccgatggttttccaaagttaatcgactctgggagattgaggccataccctgcagttagaaattacacttggctgtggtggctataattttgtcatttgtctctggctgggcttgactactagaacctgatgtagatagtgacatctagtggatcttaagtagacaagcttctgtgggcctggaaggtgtttaattaattggctaagtgcctgttgaggaaccagctctttttacccttggcatgtcctaaaaatatatccttcatattcctgatgagagtgtcaaaaatatgaaattgttatgaatgttgcttttctgctaattggtttttcttcccctagacagaagatccaaccatggagagaccctatacatttaaggattttctcctgcgacctagaaggtgaggcttggggtaggtgtaggggtgaggctggtgggtgggtataggggtgagttttgtgggtggttgtagggctgaggcttgctagtgggtataggtgtgagcattgtgggtaggtgtagggaaaaagggttgtggatggctgtaaggttgagttttgtgaatggttatgggggtgaggattgtggctaggtgtaggggtgaggcttgtggctaggtgtaggggtgagtgtttgtagtgctgctttctctgaggacagtttcagcaaacaccttaaaggatggaagcaagccatatcctttacaactggttctcttcctgtatgcagtcataaatctcgagtcaaggggtttttgaggttgaaaatggcctacatgccgaaaaacggaggtcaggatgaagaaaacagcgagcagagggatgacatggaggtaagagagacagctgcaggccctgggctcttcctggctgcccagcttacctgaatgtcgttctgagactctgtcatcggaggaagtggatgtgtgtaaacttaaatatgaattcacgtccatagaccctgagtttgcctttggaagtcctccagtatgtgactgttgcagccaaagtgaaattcccattttcctgtcacaacaccaataacagggcaggcagctcttcacacggtccttttagttatttgtccggctgctgttacaaaatacccctccaaagccactcaagggaagcacagctcacgtttcgagccaacagagtccagcgtggtggggagggtgtggaagtcagatcgtgaggcagctggccagactatgtcagttaggaggcagaaagtggacaggaacaggattcagctgtgaatagacaaggcccaccctcggtgactccagcaagactccaccttctaaaggttccctaaccttcccaagcagcagcagtggaatgccgggtgttcaaacacatgagcctaaggagggcatttcacagccgcataagggcatcttccatggcaaccccactgccagaaaccccgtgcccattattgctttggattctcagttcttttttaggttccttttagcacttgacattgctctagagtgaatagggttatttagaaactctatccctatctctgatccatttagtccacaattaacagcgcataatgcagagtcctccttgggaaatgccagtttgcagttagctatccaaaagaatgttctctgcacccttcctgacatagtgggcttttcactttctggtcacgtgtctgtacctaccgtgggttccattgaactatctccgcatatgctgtagacagtgctgtttctgttagctcatttctcatattgttctgaaagcccccatagaagaagacctccctggctgttttcacatctgtttgcagctgttccacacgggggatacttgaatgatgcggggtggacaggttggccaaaccccctgcaaccaagaggccacctttccgggcagtgtttcactgtaggcctctacagctgtcgccaagtaacagggactgaagtgggtggtagaccaaagtagaggttgagatttcccaagcaaagcaacggattggtgtgtgaaatccaaggaattgtttactctcttcttgtctcccaagtgcagtaaccagtgattcggttgattttccgctggctttaccagggggatgttagggaagcaatacttaatgctgaagatatgtgtcggaacagtgtaactgatcctggcaccgtgcagtctctttgtgcagtgcctaagcaactgtggtagtttctagactcacaattgtaacacagaagtggggaatgacacagtcatctcctctcctaccagccccaggccatccttcttggagaccaatagccttttccctacacctatagcctagaccatgctttctcttcaaacacacatgcatacttcatggtggtgttgaaaggatgaaagccatagcagctctggtatgtcccatggcattggctttgtgcaaccctacctagaggtcattgagtcactgtaactaatggttgtataaaaattatcatgtgacttaagcaactaaacagggccggcgaagtggtacagtttgttagtgcaccttctgtcaaaactgattcgatctgtaaaatccacgtggtggaaggaaagaaccgaatcatgcaagttgtcctctgacctctacacgtgtgctgtgcatgcacacgtgggcttgcttgtcagcacacatactcaaataaattaatggtttttaaaatgcaaagaaggtaaatggagtatccagatgtggtgcagagatcttagaagctggcatggttaactggagcattgctcacatgagttttggaaccctgaattggtttctctcctggagaggaactctagctcagtgtgacacaggaaactgtcataagcctcagagtaagggagaggatgccacactgggattgtcttctcccgtgatctgaagcccagactcaggactccggttgactttactccacagcatggatgggaagtggttgactccaacgactcagcttcccagcaccaggaggagctcccccctcctcccctgccgccaggatgggaagagaaagtggacaatttaggccgaacttactatgtcaaccacaacaacaggagtactcagtggcaccgacccagcttgatgtgagtaccacagatggcagggatgctgtgcctcaccctgcacagcaatgggtggcagttccaggacaagtttgggagaaggagggagggagggagggagggagggagggagagagagagacagaggcacagagagagagacagagaagaggctgttgccttgtggcactatgattggagttattctgcgcctctcctaggattactgaggtgtgcgtttcctggattcttcattggcttgagtcaccttgcctccctcttcctctgctccctctcctgattgacccaggatggaaagccagaggcagactggcttgcttcaatgtctttaccttcttactctcttgcattacttgatgatgaaactcaccaaagcttcctttatgtttattttatttacttctcaaaaacatttgtgtatcgctgccttggcatatttagaaacgcacaggagatttacaaagtcaaaattagtaattactgtttatttccacatcctactagcttagagagagagagagcagggtggctgatgcctgttcccttagtaatttttgttctgatgatagcaaataaataaatcctagttaaacctcgattactgttttaaagaacgattttgaagtggctttttgttaaatcatagtaagcagcaaaacttaagtctctcaatgtgcagttagaggcagagccacactacccacgaggaaaggagtttccttggggattatgagctccagagaagccaaaacagcagaattaatattaacaagtagttattacgcatgatcatttctcagaatgcagccaaggcaggcgagtgggcttacgagtgatagtctaatctcttcaacccaaggcaaaaaaaaaagatctcccagtttctgctctttaggtaggtgatatccagagatgctagaggctgtcctcacaaatcctttatccttagaaggtttaaaggtattctctgtataattggggggagattcttggaactatgagctgttcttggccagtttgcactgcccagcatggccttagcttattgcttagacaggatgcacatagttttgttgggggtcttagatataagtgtttttgttgatactttaggtttatcactgtttgtccttctctgatattcactgcacttggaggtttgataagccatttttaagtatcgtaggtatttggagtagaagtgtctttggacctaccttgggcatggtctcatactgtcagcaaagcagctgcatccatctgaactaaacagcacaggagtacacccaaaggggctatgtggcaaattacgttgcagggtaatgttgcatggtggcccgcgccatgatctgagggaaaatgggtacagttgttactgaggtgattctgagacaacacttgccatgtatttaaagcacatcatctgtgaggctggctgacagtctcacaggtatgcacttaacccaaatctatcaagatgtcagttccgtaagtatggcttcttaggtgtgaagcagatctcaagagcaagggagcagtttgattggcaggagtcagtttccacagcctctgctttatcccctctgccgtttatggatttgaattatccctccttagcattgtctgacatgccaaggtcatttagagactttttatgtgtattctaattttacattttgtttaataataattgagcatttcttaaaaaggcaataaatgcatcatcatgaatacaatatagcatttttctaacagccgacagtgccattttttaatcatttttgtgctttcagaaacattattactatatatatgtgcttcttgattataatgattacatctataataatatcaattttctcaagatacttctatttagtatacacatttattctggttatatttaatgtagcaacatgttttgttaatgcaacaaatttatgtattgtacattcaaatataataaaatttatttaattcagattttagtaaataaagaattataatttacttgtggattaaataaaaactaactttcacagtacctcctgtagccctaaagttgatagtgcaaagatgtttgatagaaatagttgaatattcagactgttgtcctccgacactgtggcttgttgagtctagtggctatgcagaggcccagggggctctttatttgggatatgagtgagtttgaaagtactggaaactttaaatccttactttagaaagaatctatagctaggctgtctattaatagtatatctatcagttcaccggaactaaatttctcaaccattttggaacattaaccagcaactgaatttgcactcattagatgtggagtcagatcgagacgcgtttgcaagcgcctgggaaggacctttagatgtgtactccagacacgtagcagaaatttcccccaaaagaccgtcacctgtcatgtactgcaaaatagttttaacatacagtcaattcaatcatctttaaggataagttcttaactcggattctaacttaaaatctttagtcgacaatacaaatgagatgtgacagctccatgttcttattacaggcttgtttgggaagtcagcccctgctctgtactcggtattagaagcagggtgctggaaggtggttgcaatcttaagatgtgaggtttttgttaaaaggagacagaaagcagctaaaagtcaagtcacacaccacaggagatgtccccttgggaccacagcccttgaatttgtgccgttagtatccttcggtcaattactgatgacccagattagctgcttggtccctgctaggtaggcctagaagggacctgccgactgcctgtgtgagcttgcttgtcacttcctgccaaaggactggcttgtcacagactgaagggcctagatttctcttctcaaatactgaagcttcatctctgaacagccaaccctgtccccactgcctccacacctgtgggttcagctgaccatagaacataactatcggagacgtattaggcctgtactgaccctgagcagtagtctgtcttcgtcattccctagacagtgcaggataagttgtttgtggaagatttcctttgtgtgaagcattgtaagccatccagcggtgatttaaagtacaccagaatttgtgctgtgtgttctgttaaatcagccattctgttatagggatcgaacatgtaggatttgaagtctgggggatagggagggctctgcagccaatcccccgtggatgcaggaggatagctgtatatgtctgaaagatgctctaactcttgtacaatacactgaagctgttttggggggctagggtgagtgtcagtggggtctgtcctgaagatggaggaagacttctagtattggttgcttgttcctatcattgtttgacacagatgtcttagtcggtgcgtggaccacagtgagggttggactgtcagaggcatggctctgaataccccttctcttcttacatcccccccgccctcctttcagggatgtgtcctcggaatcagacaataacatcaggcagatcaaccaggaggctgcacaccgacgcttccgctctcggaggcacattagtgaagatttggagcctgaggcctctgaaggcggtggagaaggccctgaggtatgatgtccagagatgctgtcgaactaagtagctccatcttccaacgttccccagggtgattttgtaccttatttttttcccctctcggttaactgtgtattgcatgtgacgattgcagcctcatgactaactgatttcccacctgagtattagtgaacttagaaaacgcttgtgaaaccaacgtttgaccaaacccagtgactcgtagaaatatcaaggggagaacatgattctggtgtgaaggtcttatatgccaccccccccctgggcccccggggacctaaccaatctcatgacacaacactaaagttgtcattttgaggaatggagggagctcagtcacttgtctgggtctcatgggcaagtttctaatgagttgcttgacatcttgggagagattacccaaaaaatgtacaatctgagttgattggaatattgataactcttctctataaccagttagcaatgtgttactggaaaaaagagatgaagtaagcaacaagtcagaagtgatcttaacttgatgctgatgactggtccttggcttgacctcgtgttagaaaggtcattcacaaaaacctttcagtgaccagcattagaacagcaagctagtggtttcatagtagggccactgaacgttctgcagaactaagccattttaagaaagaaagaaagaaagaaagaaagaaagaaagaaagaaagaaagaaagaaagaaagaaaggaaggaaggaaggaaggaaggaaggaagaaaaaagaaagagagaaaggaaaactatatgagaattgcttgtaaattcttggggtgtttctaatccatttgtaacacaggctggcaaaaagctgccacggtggggtgggcgtgtatgttgacaggagtccatggcggggtgggcgtgtatgttgacaggagtccacgcgattgtggccactggacctgcctgccccctcacactatgttcacatctttatggactgctcacttcagaaatttgctcgctctgaagtttcctggcctgttcattggggcaaaggcccttgttgtccttgtgctgatcctgaagcgtttgtgtctcgtgctaagtaggggttaatcaagagtcttctactcccagtcagttctggccctccgaagagtttccctctttacctgaggcaattctatatgaaaattggccctggcaggttggggaaaacaaaaaagttgttcttttagaaagaagggggcgtgtcaccagccttttcttgtttgatggttatgaatgttgtgtgttttattagaaggtagacaggtaatttcccagatcctagcacttatcctagtgtctgattcctccatagccttgggagaccatttcagaggaaatgaacatggcaggagattctctcagcctggctctgcccccaccgcctgcctccccagtgtcccggaccagcccccaggagctgtcggaagaagtgagccgaaggttgcagatcactccggactccaacggggaacagttcagttctctgattgtaagtcatggtattgttagaaaagctggacaccggtggtcagtcctttgttgtagcttctgaggatgttcttctatgcagataataaccaaggccattggttcttgacctacaggtcatgacccatgtaggggtcaaactaccctttcacaggggccacatatcagaaatcccacctattggatatttacattatgattcataactgtagcaaaattatagttgtgtagtagcaacaaaataatttcatgttggggtcaccacagcatgaggaactgtgttaaagggcattgggaaagttgagcgctactggccaagagtgttctacttccagtcagttcaggctctccaaggaacttccgtctttacaagaaggaaatttagccctggcaggttaaaaatatatatatatatatattgctcttttagaaagaagtggcatgttaccagctttttcttgtttgtaaaaaattcaaaggaataagattctgtggattttgtaagttctagctttagccttgtaggatcttgttcctgtccaaagactcatgaaaacagtgtctctgccatgaggccatttcctggtgagaatccggagccccagagcctcccaaccagtcttgtaaactcccactctccacacctctaccttccatctcacaaacaaggagaacggatatttaagtgattgtccctggcaaagccctggcaaagcttgaccatgagatagaagaaaccccaaaaccgagcatatgaactcttaaggaaaaaaaaagtttgaaactgtgacccagacatcaagataacacttgacctgggtttctcggccctcagagaaatacttcctagagggttcagctcagtgagaaggaacaaggtcaatcacaaagaactttgcacgtaacactgcgcggcactgtggggggaagcccgccagtcattctcatgtacatacagaattaagaccacacgcacatgccatgtttctcaagaaattggacttaaagatgtactggtgagaatggtggttgtcactaggtgggagacggcatcctcacacgatagtcatggtgatgagcacacggatcgtaaaatgattggaggactccattgaacctaaaagccactacgtacaacaacattattagcccttcgattatggtgttctccttaaatgaagctattggcctctgctgcgtgagtgacagtgactgtgtgcttccacattaacgttctataaaagtctttcagaaagaggatcatcaccaggatggaaattcagtactaagcggatagagacgaggctgcatagatgagatatttgaattggtaccccaaaaaaagaaaaaagccctgttaccatggaaacagcatgagccacaaggccacatattttaaatgtattaaagaaaaaaattgcagaaattataggagccatataccatttatataaacctcgtgggaaagaaattcctagttttctatgtcgatatgaattggcatttgtcacgatgagagtagggagctctccaatgagagtagagtattgagtgcttccagaaaccaggcgcaacctgaagacccgagtgtgattgcatatatcccttggggaacttcctccagtcttgatgctcaaggctgctctgtattcaagagcagtgaggtgaatgctttcctcaggatgacccacactgcccagtgtgggaagacacaggtcacccctgacacctccacctagctttgcctgaccttaacttactgtttgttattatacaaagtcacgcatgttacaggctgtagcatggctaagcattcttctagctaggcggcttttttgcctgtgaccttctcgaatctttgttcagatccacaaggcaaacaagtagaaggaacattctgtgtggcacacaggattgtccttgggtgtgcctcgcttcttctccgctccacttctgttggaactggagtttcctccacttggaagctaaatacaacccctaaccctagcaggaaggatgggcagtgtctaagtgcgatggccacacagtttagctggtaaagagccaagtgtccctttttcttgccccccttttcctccattcttcacacttgagaatttgtccagagcttgtgtcccaggtagcattgacctcttgttactcttgagtgtcttggggacctgcctcctctcccttccagtagtcttggcctccttttacctataaatcctggttgccggaggacactaagagttgaaactgagctctggaagggctacggtcactgctgggaaacaggtggtgttcgattgcctcctgatgtcagagagcagggcatggaagtacgaatgggttctgagaacactcctgctaaccctgcctgtctttccattccctgcagcagagagagccctcgtcaaggcttcggtcctgcagtgttaccgacacggttgctgagcaagctcaccttccaccggtaacaaacactcatttccagtcctcagctggtttcctgttttggtttggtttggtttggtttggttcggtttgggtttttttgtttttggtttttggtttggttttgttttgttttgttggtttttgttttttggtttttttgttttgttttgttttttgttttggggggttggtttggggttttttttggggggttttttttgttttgttttgttttttttgttttttagctttgatttaaaatcttcagggctgctgagaaagagtttttcctgtgtcaatccattcaccacacgagcaggacatttgaactttgctgattaaatcgtgcaagggtctggactttccaacccagaatcctacctaccacctaagcttccaaaatgctaaaatcttactctggttttactgagtaaaccagtctgagtctactcagcagactgcatccagcctgcttatatgactgaataggtggtctgtccgttcagcagttacaactctgagtttcagggagctgaactcggtacactcactgacccctttgaacaggaagaactcttccagtgagacagcctgattttttttcccactacccgcggcttaaactctcagctccacaaagcaactgcgctaactctaaaggcagctgcacaggtgaaaaatggtgtgtcctttgcttttccctgcctagagctgtgataagtctgagcgcgcaggggcaggggatatccaatatatgctaacgtaaatatcaaattggagggcaggtgagcattgcctcgcaagaaataatttgcataaattggtttcttctttgggaggtgaaaatattctatggttttaaatgttcaatttaatacttgaccttggccttttgtttgtttgtttgtttgtttttatgggtttgtggggagacaggggtggggggaattaagacagaggcttggtctataagccagaccagcctggagctctaattatagactctaggctagccttaagcttgcagcagtctcctgcttttccctcctgaatgctgagatcgcaagcatgagctgtcacacccatttttttttattattattattactacagatcctctttcctgacctgattcattgtgtatgaacttgaagacaggcagcagaactaaaatttttgaaaccctcttcctcgcatacattttttttcccctgacttcaagggacatttttgttcaggtcttactatttttaaaagttacaaaatgaagtgatgtgtatgtaccagccaaaataataaattgggttgtggagtccattgtgtatggttggctgataacaagctgagatgggttcggtgccgtacagacctcccagagcagaaccgtagactgtgccgcgctgttggggatccttctcagcctgatgattctgtgattgtcctgcgaaattaatcactctccccttcaaaatcagggtcagctttgtttgccgcagagtccctttgcctggatctgtgattgtacctgtccccttgttcttaagatgctgtgctgcgctcatggacccccccccccccaccagtggcctctctgagatgcgcagatataagaatctgctaagctttggactgtggaagcacaaaacattagtcaccccgatcaaggatgtagtctgagcttctttggggtggcgtggtgctacagagaggtcactggggcgtgcccagcttcatttgaacaaggcggatagcggggataccaatctcacgccacctgtcacagcatctccacagcagtgatttctggttcactaagcaatggacgcctccctcaccccccaccctcaaaatacatgttactgatatacattatcatttaacagcccagcaccccaactaggcgagcccgttcgtcaactgtcacgggtggtgaggaatccacggtaatgaccccagttattgaacactaacggtggaagtctgtgggatggtttattattttgcttatgatgaatatgctccctctcattttcaaaatcaggtcagtttctttatggtagggagacacctgcactttttaacctaaacttctcattttggggttctttaaggtactaggtaaaatggagtcgtttttaaccctgtatcatttgaagtactgtatgattggaagtactgtcaagcttggtggactgttttggtcggtgtctgtactccggtgagctttcttttgctgtcgaatactcggttaagcgagagaagctataggagtcgttcaggactgtgcatgtgagtcgaggtgcgcaagaggctgtgcactcctctttcccgcaccacatttatagcagggaaccagattgtctgcatcgccatcctaacctgtaaccactctctgctaccggaagtctgattttccaagaatgcacaagtgtttgtatgattcccagggcagcaattaggatatttcaatgaaagtatttacaattgttattattttcttatttttgattgatagcattcatgcttgtgtataatttcgatctgactagttgttttgtcgtgtcctactgacccttgaagtcaggccacgctgtatttgctgatttgagcttacgtgactctcgggagaagtgtcttaattgtttcacctgtgccgagcaggcgtgctgaagctgcttattatttgtgaataactttaactacttacacaatagctgatttcctagaggaagtttagcactccgtgttacacaaaggacactcagatatgcaaccagagcagtgagcacggcactaggctgctaagccgctacagtcaagaaccggaggaccaggctccacctccagctgaagtcaaagaagtctgcaggcgttagttgcactcctatggttgtgctgacacagcctactctgagtagtagagccacaagcagaccattccactggatggtttgtctgccacccatagtatcctctgagtgtatcattccttgttatgtttaattgggtttgcaacctacttatagctgtggagtgttaatgatggctcatggtatcaaaagacagagcaaactgactgtggtaaatagtcacccaaaaggacaaagtcattcgtctgcaggagaacccatgtgcctctagggctgccctttccaagccttcctcccacctgtgttctcctccatccatgaatatggtcttttacttgctttggtcttttatttttgaagccctagcagtgatagtttctagatgctcctaccatgatataccatgctttcttcatacctagatagatttggaaggaccatgtccgtttctctcccgtcctctctattttccgttctgcctcccagagtgactttaccctttgacctcctttttgatgcatatgccaggcagaaacttcctataaagtatcccctcactccaatgccctcccaaacatacgtgtgccatgattatacatgcaggcgctgtttatttgggggggcggaggggggaaccagcatgatgttgcatacattatgctcagaaaactatttttaacttaggttagtttttctcagctatgttattaagcattcagcattcagcggtggaagtacaccacagtttatacacatttcccatgctgacgggcattcccacactgtctactatgtgtggtcaccgtccttctatgtagcgctcctcccaaaagtgctgatcctcgtctgaggagtcccgaccttttgatttatggcagaagcctgcacactatgtcactttattacaggctgcaccagggttctccctttcagatagaaagagcgagggagcaaaaccctttgatcttcactgaagagattctaaaaatatcctgagataccactgtggctgggtctgggtgagtcatggagcatctatgatgctcagtatcaaaggatagtcagactccctcagtctcgatataatctgttcttcattgtagtgagcggatcccagcctccataaggctggagtgagggcctatttggaatgaaaacgcccagcagtgtatatagtttcggatgaaaactcaaatgttatgttcagcgtatgtttggcttacctaacctgtttctcgagatgagctgatgcatcattcacataggtaataaaagtctaatcattggacccaagcctgggcctcttccaagagccgcctggagaagctgagtcttgtcgttgctggtcatgtgccctgggtggccgtgttttagtaatagccggaatcactggcacaagttgttctacatgcttgtcttgaaaggatgctgtcaggtcgtattttaataacagcttcttgcatagatgtgactaaatgaccagttgcctatttaattcattttagacacattcagaattctttctgctagcctcctttgtgtaactagtcatgttattggtagagctccggaggttgttgcagctgacagttcagttctgagactgtaacacatctaagcatttagggatgtcagaaagtatccattccaagaacagacgttgccattgtttgttaaagtctcaatgtttctagacctgtgtcttctgagaacctatcagatggcctgtccctaaaacatgactcatcaaaaaaaaaaaaaaggagaacagtaaaaagtgctatttaatattccatgtagtcaaagcaattgtgctcatttaagccacagtaagtcaaaacgtattgtctatttgcttagatgacagaacatcagactaggcttccagccagtccagattaaaaccctggaagggaggtagggctttgttgtgggtgtcttccatttaggctgtggaccacttggtctgtctttcatggtcataacagcttacatctctttgttggtgtttgtcttgctcctggattcaggatgctatgtggttcgttgctcttggaattccctgatcctttaggatgtctctgggaaaatgtcaaggagcatttttttagcaagaaggttcctcatatatactctctccctgcctgataaacatagcttagaaataaccaccgagtcagctgcttcccagttagttttccagttcatttttctggagtgtgctgttgagcgtggaaagcccatagaggggcctcttcagtcacagtccttggcaaatgcaatatgcatgttcttgcttcctctaattccgggtcacggggcactgaggactctgtggctgtgaccttcaccagagcagttcatagtaagcagggtagctagggaaggacagaaagaaggctcagtaagagaagagtcacatgatcagcctaattccaagaaagcagcaccggctgaggtacttaagagaactggtgggagaagaccccacaggggaaacagcccccagagcaacagggctgttcctcaacctcccagaagtcttgctggccctggtaggtactgtctttctgaacgcctcccctagatcgttgcttcccagtacaattcgtgattcagttccatggatgcaggcattcctaggctagtgctcgccctgggcatcccttttctgccagtcacgcagacatcctgtttactctagcacctgttcacacagactcacgctgcttcttacacaaggcaaaatctcagtaattcttcatttaaaaggatggaattcatactgggtgtggtggcacgtggcagcactggggaggcagaggcaggctttccatgagttcaacgcattcctggtttacatgtgagttctaggccagccgaggctacgtagcaaaatcctgtctcaaaaaaaaaaaaaaaaaaaaaaaaaaaaaaaggagggagagagagggggagggggagagggggagagagagagaaagggaaaaaagaagacagagaataaagaatttgcactatctatagctcaaactagacatcacagactatggcagggatataacctatgtcattacactggtataaacactgactctaatatgaggcttcataggaatccttcaccagggaacttggggacctcctgggctgagcagcaaagacactataaggaccctgcagattatgtctccgtacatgagtgaaagtcagaggagagactctgtgtcacattttgccctgaacgtttgtgtgcaccgggcctcagggagagctgtgcactgagcatctgtggaagccagctgtctaacagtgcctgcagcatgcattcctcttctgggcctaagtgttgggcggcttgagactctcttttgaactatgtgaactttagcaactggaccaggttatgagacattgtttttttctttactcatactttggtaatggttctgaatttaagacctcagaggctaagagatgattttgtaagaatgtagatgcctttttgtctcacaggagagtagacgctcttagaatccgtttgtttctgacttccagatagtctttgtgggttgtgggttttggtttggtttttctgtttgtttgtttttttgttggtttttgtttggtttgggttttttttttttttctgtacaaacagaattaacttgccttgcccagagaaatataatttctaggtggacgttactttattaaactggtcagggaaacaaattctagttgttaaataataataatttcttgcacaaacagccatcagtggcctatgtacataccacgccgggcctgccttcaggctgggaagaaagaaaggatgcaaagggacgcacatactatgtcaatcataacaatcgaaccacaacttggactcggccaatcatgcaggtaggaagatcaccacccaacccagactcaaggaccgtagcagccaaggtgtcacgaccagccgcctagcacggtgatcatgtcctcttatgaagggcctgcattgaaagcagccctcaccaaagatatgtgttattctcagtagaatatttgcctgaggaagactttggtccttggatatgtatatccaacgtgacgtaaaatatactttcagaaagtgagcctatgaccatggatggctccctctctctccctcccacaccctaagtctcttcttctccaaggctagtttctagttggccagtgacttagtttttgttctcttgaatatgtctcccaagtctttgctccctcccccccccattattagttttaattatttcctgtatgctttaaataggccagccatattatggctgtgtgagttgttgttgttggggttcatactcctcatcacacacagggagatcctcatacaaagagctaacttgtttttgcctccaaactagcttgcagaagacggtgcctccggatcagccacaaacagtaacaaccacctagtcgaaccccagatccgccggccccgtagcctcagctcgccaacagtaactttatctgccccactggaggtgagaagggccgcctcgtctaaccagggtcatctctgtcctgtggcttctcttcattctctcttctctcttctccctaaactggactctgttccagaggcagccccacactgagcagtcatgtgttggtggcaaaggctgctctgcgcaggctgcccaaatgctttggggtctcagtcagctaacattctggactctctcataatcttcattctcattcggctggcgccatgtgtggccggtggtgcgctctctgctgaacctgtgcggtccatgttgtgttgctccttcttgcctgtcacaccatcagatctcatcattcttccgagtagccatgcttctgttgggtttcataacatagcgatcactttgttcatattttctttgactgtagggtcttgtcttccattgtgtgggtacgtgtttctaatgtgcattttcatctctttcatcattgctgaacatctgcttgtacgctatccttgacatgctttagtgaccgccctgaacgtcataaacagcagacactcaaaagccagagaagacatgagtaaattaaagtgctctgacatagtgggagctggtgacagcacctccagactgtcgggaatgtgggataatgactgtcattccaggtggctgcctccattgatggaggtctccttccgggctctaaaaccaggcagtgtatttgttggactgtgggctctttgagagtaaggacttgtcttgctctgctctgaaatctctacccataaaatggtatttttgacaggcatgattggcaaagaattgtagctgcttatccttgatatcattgcttatctaaccaatagaaaggcctaaagttagggttggttagaaagtagatagagaagtaattgggggtttgggggagcctctccctcattggtctccgaggaagagctttctacagtaccagctgcattgtgacgtgtgtcggattggcccgtggtgaagagttctaacactcgttattgttccttagggtgccaaggattcacccatccgccgtgccgtgaaagataccctttccaatccacagtcccctcagccatcaccttacaactcccccaaaccacaacacaaagtcacacagagcttcctgccaccaggctgggagatgaggatagcccccaacggccgacccttcttcattgaccataacacaaagactacaacctgggtaaggctgctgcttttatttggctccgatttcttcactgtgagctccggttaattctcttcctttccgactcaatccttgcgttccttctagcggagttctatcaccagctctgaagcgagtgtcctgaggggctggtgggcacctcggatgctcagacacagctgggggtgctaccagtgtggcagtcctgcaaagctctggttttaagaatttgttccattttgagggtaagggcaaccttggccctgctagccttttgacttcattgtaacacttctcaggctagtagtcattgtattaggaatggtaacatttgaaactagtgttttccctgtctctttttgccctgcccacccttttctctctaatggtcatcccagataagcggtctgaatttctgtgctatattctctctcctttttttcatgaattaaaattgccttagtgacctggtgaagacttgactgttcttcccagtgaacattttgacctaactgatttttttttttcgccttgatgatctttatccactcacacgggtgaaagagcctgtgtgttgcacttgggagaaatgagttgaggccaaggtgaatgaccatcagatcatgtccctctgtcagatctttgtttcatcagcatactcagagctagcttcttcaaggcagcacagagctcttgctagaaatccacattcctccattatagtccctaactctgtacgtaagctgaatttcttctcttgtttctggttggttttgatgcagcaggttttcacttttctgactgtgtagagcaaagttggggcttcatgctgcccctccagcatcaaaactaacctcagttttccctggatgactcttcggtcttggatcagttgtgcccgtgcactactggttcctgtccctagctgtggtgactgcccagttgatggaccaggggtattgtgttaaggaaagggtttcgaccaaggtgaccttggctatcatttactctcagtctgtggtgtaatgttaattcaatcccttgagagtcagaccgtgctccctaaagtcctgtgggctgaggtgcagcatgtccccgcaaggacattcttggcagctagggacaggcctatgccttccactgcgggatgctcaacacccttggctcccaccgccgaatgctaatagctgcctgtgaccctcccaatatactgacaatcaggaatgcactcaaatttccagacaccccatggtgagaactgaaccaatctccaatctccggggggcccttccctgttttgcagagaaaggaatttacctgcctgccaagggccttcccatcaaggtctgatgacattcatttggtaaacctataactacttcagaggcatagaatgacagggaggttttgtttaactcacctttgagtcggaagatagtattacaggcctgtgggccaagagagctgctctttggcaagtagaaccatagagattggtttggggtcttttttttttttctgtcactgacacagaacctgggcagtccttctggtgttcccattttccatagctctgctggggttccaaacccttagccaaaaaaatcagagctccagagataggggataaatatcataaaagtcagaggattagtgaatggagccactgtggcttgccaacataagctatgattttagtaatatgaactagcttagtaatgaaatcccctaaccttttcacagcctttcacgccccaactgcagcgtaagtgcagctgggcaggattgattttaaatagcactcactttctttactgctggcaccggtgccaaatgaaacctgcttttaatcaccagttgtctctctttaccccagactctggccattgaccgattcgctcatttgaacacttactttattgaaacacttcattgcagctaccgttgaaaagttcttaagcagcaactggaattccctcaagttatacctcccttcttcagcaggcagatgtgctgacacagctgtgttatcccgacccaacaaaaacacggacagcataccgcattctcttagagaaaagcagattcggaactaactgcatgtctgtcttgacgaggggtgggagaagcaggaagagaaaagacgctttttgaattcaggcatgtttgcagatggcaaatatgaaactcagagagggcagtgtattcttcttggatttgagtgttgtaacgcacaagggacaaacaaccgataagacagtgaaaatcacacttcttccctcttcatcctgtactgttggttcttgaccttctctggaagcgtgaaaagacccaagccgccatcccctttagacctggagagtgagtcagttagaatcattctacagtgtgcagcctttattcacacaagggatgaaggctgtctaactggaattaaatatgaccacatttttaaaaaaattaataataatggatggctttagcctcaccaacagcaatgtatgctgggagtcactagagacccttcttcattcccccttcttaagggagcagctaaatgtgtatgtgtttgtatattgatgcctttcacaagacaaagcattggcctgtctttacaacagactttatgcattaagttaaattagagctacccaagttcacactaaccaaagcgactgtaacctagcgtgcctgctgagactaaaggaaaaaaagcacattaggatcttttgaccaatcagtattcctgtnnnnnnnnnnnnnnnnnnnnnnnnnnnnnnnnnnnnnnnnnnnnnnnnnnnnnnnnnnnnncatacacacacacacacacacacacacacacacacacacctacccagagggaatgtagacatggcaagtgtgtttcatctgcttgcttgcttgattgattgattgatattcttgtcattgaagatctcattagtattccaccttaccatttaagtgttagcagaccccagctgccatgtctgtcacttgtcctacctccttgggttgtccaagggacagtaccctcagtggttaccactacatagtcctcatatacggactacgggcagctgcagtcatttttttttctactgttactatgataaaatacgaatccttggcctgggcctgccatgctctgccatgaaagtgtggcttccatacaaagccattttagcagacctacaaagctggctccctccttcttcccctcccccggggcctggtacttttcattgatcttaggatctttctgtttttcttctccgcatcacccatctgtggcccacagagccaatagtcttgcacagttgacttcactccatggctgggctttctgtaaacctgacttggtcattggcttcctgggatttcaagggtccttggtagctgtggtatcacctctcatatctcagtgttcattttaagtcttccgaccagttagccagctccaagtggtatcctcattatcagcttcttggcctctctaaatcctaaatcctggcctagctctgtgtgctgcaatatgctacacggatgtagtgatacaaatgactacatctcaacctttggaaagatgcatttgcttcagggtcaacattcctcacaaagcaacactacgatgatttatgccttcaattaaaatctactctcgcttgtagagacagggctgcttgtacccttctctgttcttgctatttccaaaaacctctcacttggttatcatccagcgctcctggcttccactgttgatccgggaagttaatgaagcctttggtttagttggcagcagcgcagcctttctttgctttgatgagatggagctagtgtcaaacggctccatggcttgcttttacctgggttgatggtgttattgttccggttgactgggcatcgttctgcgttttatttgttttctaatcttttgagtttaaaaactttggattctttaagccccaattgtctctgtgtaaggggcaagtcccaactctggatcctctcctttgggcaagtgagtttgagaaactgagtctctgatactgtttttcttatttaaaggaacagagacaagggaggttgcaaggtcagatgcctaactacttttttttttttttttttttttttttgcaaaggagaaaacataaccaaagatgacagagtatatatttccttccttgatttttctctggcctcttaggagcatattttttaaggaaaaaatgcttacaaagtttatgttaagacagggacaggaacctaatcaccagcgcttgatcggtaatctcattcatgttgcctgctagcatacgtataacttataggatgaagcaggctatctctgcaatagcccatggactctctggtcagagagatgcagaaggaacctgtgaagcccaagtactaaggactgctgttcttaaagggtcacatttagagactatgaacactcacccctctctggaggacagtcacacttctcccaatctggttgcctttcccctttccctttctctgagtcttggggaaacagttaacctcccatcggaggcctgttcccctttcctgagatgtggtagccaggcttcctctaccaagcaggcaggtcgctgggatcccctcccaggtgcctgggagcatggaggaccggaaggtgccaatgactgcgcacggggttccctcttaactactatcatgtacatttttcctgcaggaagatccacggttgaaatttccagtacacatgcggtcaaaagcatctttaaaccccaatgacctgggccctcttcctgtgagtatactccagagacatgaaatggtccaggagtgtacgattatcctctcagtgttcctgggaagcctgcaccccctgccccaggctttctgggtccattggtcaatgttccttagaagggtgagacgccagggcagtttgaaaagtacattatagtacattatgagccagtgcttgtaaaagaaggcttctaattactagccagttcgtttttgatataggacatgtgcaaggggcgactattgcaggtggcaatttaagcagcgtgctgttcattttgtaacttagcaactcctgagctccagccaaactgcaaacaaagtcctaagaacaaaagccatggaaactgtggaaggaaaaggcacaaataatcacacaaagtttctctaaggtcacttaacctgtagatcttttttaaaaagcgttttcccctttgttgtgggctctttatgaacctgaggggagtgctttgatttttttttgttttgtttttgcagttttgttctcctttggaggcatgatataatttggtctatactgggtttgggatgaaacgtttactatctgccttcttcaacggctcacccttcattaaaaaaaaaatgctggagatgaggagacagggttgggttggggttggggttggtttggggttctagtactcatttagatgacccagaccagcctggaactcaaaatcccccttggtcttacttcccaggttctaggatagcagacatgcaccactacacccaaccctgagcaaactgtttttaaatggaagttgttattatttcccgaggataagaggagccttttgaaagtttaagaaaatctcttaggctgtgaagatggctcggtgtgaaagagtgcttggggcacgagcgttaggatccgagtttgaatttccagaacccacacggaaagctagacttggccacatgcacgcctgtagcccctggtgctatagggaacacaggggagggtcactggagccggctggctactagactagctccacgctcagtcaaagaaagaccctgtctcaaagaaacatggtggagtatgaacaggatacccggtgccctcctggacttacacacacacacacacagaggcatgtacacctgcacaggcatgcacacatacaaaacacacacacacacacagagacaccctacccctcataaaaaaaaacccaagagaaaatctattatctctttctgagtcaggtgaggtgtgctgaccttaacgagtaccaaatgttggggctgtgactcagcaggtgaagcacttgctatgaactactcgtgtaaggatggaattcagacccccagagcccacaacagaacccccacgagtgggtgtggcacccttcctgtaagctgtgcaatggagaggcagaaaggcaatccccacaacaaactggctatcagacgggaaaaaaaaagcacctgctcccctgagacattgttaggatagagaacaatcaaggaagacacctcagcacaccacgcccgttcccacccggtgcgctcgcgtgtgcatagatgaacacccacatacacaggtagaggaagcaagggaaagctgtctgttgcccgagtcttttagttctttagtgtgaatggtgggagtcctcagcactggggctgcccagccacttaccgtgtgacttattattcttacaaatgattctcacttcgtatagtcaatactgctcagatctcagcaagacaagataaaggctaagattcatctccaaaggatatagttatatgaacctcctccttccctgaagtatatagtagggattttaactaaaggaacatcctatcctgaactcttttacaaatgtttctcaggtttatttttatgtatattattgttttgcctgagtctgtaaatatacactatgtatatgcccggtgcccgccagccaaaagaaggcatcagatcccctggaactggaattacgaatagttttgagatactgtaggtgctgggaaacagacccaggtgctctgcaggaacgtcaggtgcttttgacccgagctgtctctccagccctgaagttcccagggagccccgtgctggtgtttcatatggtgaaagcttgtgagagaggtgcttggtccttcgtgacttgttagctgtgcattgtttggcatttcctcagtgctcaggtgttccagcagagaagggtcctggagtgttagtgtcaccaccgtggatttgagaactgctaattgatgtgtgtgttttcccctgatttgggaactgctaactgatgcttgtgttctcccccctccttgtcctggatgctagcctggctgggaagagaggatccacttggatggccgcacgttttacattgaccatagtaagtagcccctgctgtgcccacaggcgtgacagggtacaggaaggggagggtgacattaatgtgatggtgaagctttgtcattttgctccctgtccaggcagccaggtgttatgtggagagaatgataccagagagtcagtgcccttatacggtactgtgccttcaccctgaggttgctcccaagtagcccttccagctttgatcttgtgacctattaacttttgttaatgataaaaaaattttttttaagttttgttttgacagtcccttgatatctgcgcttttttaataaatacactctggaaatagaaaataagattagaagtgatgatttagcttttaaataaaaagaacgaatccacgggagcaatgttctccacagtggatgctttctttcggagcactgacttccgaggcccgttctgaacttattttctatcgtggcatgtgtccctgcacccagcccactaatgatatatgcagctgttttcctgaaaccttagtgtatctgctgaaggcgtttgctttagcacccgtggatatatgtgtggtttctcatttcatctacaagttaaactaataatccttgcttttagccagggagttgggattgggggagttgagggaagttttgagttggtttcgtttggtttgggggggggtgttttgttttgtttgtttttatctttagcgggattgttttttttcataaaattatattcatgtagccctaaaactttctgaagaaggaaacaaacaaacgagctttaaaaagcttctggtggagttcaaatccatgtgcagttggtgggatgtggttgcgtgtttttatttagttcggaagcaggaagtgagctcaagtgtattgatgagcctgttgctgagactcctgtccccaagcagtgctcacacatagaccagcgactctctgtggggaggagggacttcctcccagcgtcactaggggacctaggatcctccaagaacttgccttcaggcatgaaagttagtgggtttgaagtcagtgagaaggcctacccaaaactcagaatatttagagggcagggccacgcttagagttcagacagattatttcaagatatataagctttcgttttgtctttgattagaaaaacaaaacaaaaaaacagagttagttatacactttccagcactgtactgtgagcatacagttgtcaacatgaccactttctttctaggtacatgcatggattatccccaccccacaatattatttattttaaattctgagaactttctaaaatgggggagaggttccactcttaatgccactaaaaacagctctccataatttaccaagctttgccctgtggatgagtgtaaagggatacataccgagaagccattcttctgccttatccatcaaaatctagtgtgtgcactacaaaatccctgtgttttcaaaggttttctccggtcagtgggttctcccccagacagctttaatcacctggtggataagagttagaagctttctcaccttcagagtaaaatgttcccaacatttatctggcaaaatccaccatctatctcccttggctaccaccatgcccatgggccaggaaccgggcttctatacaggtgccataaggcattttctatgttgacagtgactgacctgagaggcagactttcagaagcactgaacgctcgtttgaacaccttgattcatttgagagataattactgacacgctttttctgggtaaagtgttagagaaatatctagaaatgtttttctcacagaccagatgtgcccagaagccgagccatcagccagtggtatctcaaatacaaaagttacaagagaaattccaataatttctgtgttcctgcaccctgcccatagttacctaatgtaggagcagtagctaacgtagctaggtttctcattccctctacttccttttcgtcgtttgatttgaaatgtaaggtctcagagaaaaaagagtatgtttagattctgccgttcgttcttttttggcacgttcttttttggctaactgtcctccacagcagactccttctgtagccccaggatcatgtgtgtggttccagcactcagactttttgaaggactttgttttctctctcggcttcttccctcagtcattacaaagacaatccattaaagctcccattacatgctacatggggcatggtaggcagtggagaggaactgtgagactgagaccttacaagccctgttctcaagggcccatgtctggtagagagtgccaggaggtgtcttaggtattgtgttggaaggtgaacctgttacttgagtgctcagcttgagagtggctgaagatggctctgtcggtgtgtgtgtatctgtgtctgtgtgtgtgtgtgtgtgtgtgttctcttctggacagattttgagcaggattcgctctaaagggcatggtgggaatcgggtttagaacaaaccagatagggccagccattccacactggtagtgagaactgccccacgggctctgcccctcaaaaaccctaaagccttggtcacgatttgtttgtatgtatatagacatttacaggagcgtgactggtggtgccacaccaacctcgaaggaatgcagtcctgttctgcctgactggcatgcaaaggaggctggctggctggcatggcacccaagacaagccgacagatatttgacagggaggactcagattcactctgcaaacagtaggagcttcagagggctattcccagagtcgaaggacagtggtcagatgtattcttgagaataaactttgggcagacctacgtaggaaatcttgaatagaagctagtaagaccatggccttggagatctagagcacggagctacagtccaggacacagatgcatgccccatccagcaagaacaaagtcatgacaattggaagatcaccaaggactggcaaggacatgggcaggttctggatcttggcggtcagtgcattatgacactgcttttgttaatgagacttctatcattgtgacagataactggcccaggcaatgtataggaggaagaattcattttcgctcacagtttcagaggtccatcaagtcctttgctccattgattctgcaccgtcatcgtggtagacaaatgtggcagaggctactcatcctaacagactggaagagagtgacagaatgtcaaggctgatgacccttctcagttttctcctttaaatccatcctagcacccagtttgtaggctggggccacccacattcagacaggtctttcctccacccacttaatcctctctggaaaagccctcacagacacacccagagttttgcttcactaatctcaattcaatcaaatcagtgggccaggttaatccttgggctgctgactggggtgtgaggttacctggccactgggcgttggcgatcacctgctcaggaagctagggagacccggtgcaggcatcagggatggagtcagaagatttgaacgccctcctgtgttgggagaggcccgtttgttttgacgacaaacatccagtcaagacagtattacccaagctgctggataaaggcatggttctatctagctgcgtcctgctgtattctgtgacctgtgttttattttggtgtttttgtttttgtttttgtttttactttttcacctcagtagcagctttgaatttccaaagtctttctcgttttagaaattagacaacctaaaatagcacccatatttaaattgtatttatttatttaaataccacctgtatctgccggtgttccttgaagcagttgagttttacacttgtggacattttctgccaaattaacatgaaattagcattgtagatgtatagtcttaaggggttggagttttttggggtttttttttgttttgttttgttttgttttgttttgttttgtttttgctttaatcataatcagcccagagcattttttgttaacaatgcctctgttttcatgaaagttcataacatcagggtttttaaaaaaaattaactaaggtgcttttagagttgaatctgtgagttaccgtcagcacactagtgggctaagagtgagcagggtgttttcagagaaacaagcgcccccccagcccacaacttatcttttaaacttagaagtaacctgttgtaccccagcctgccctttgtcacctgagtgcccagacgcacttccacctgaggctgcacacacaaggcccctctgaagcagttttaatcatgtgcaggtgaaaccccacatgacctgggcagctgctctacgccatcacctgagcccttttgtttgccttttgggagaaaggaaaactgcccagccaggctgccagggaaccctttctctgaagtcttgctcggctatgtctaattcttatttttttatgaccgacgacctttgctgccttggctatgtgtgtgtgcgagaggcacaaaggtggattatttctctgttcaatgtagaaatctctacttgaaagcagtttttcaacatcataagcaaatgctaagaagtatttgaaatgagaaagaagtgtgtgtgtgtgtgtgtgtgtgtgtgtgtgtgtgtgtgtgtgtgtgttagttaacttcctagggaactaaaccttatgccttttgaaaaatcaagatcaagttataaatccttaacgagtagaggggtttataattgcacatttaccaggttgctcaccccaaactgcaaagatatggttttacttttgttgtgcatttttattattattattattaactaatcatatatatgtttgccatgcaatagcagggttgccttctaaccccaaaatactaaattctccctggggtcaacccaaaggggctttagaaaggggaatttttctttcttaagtaccctgtagaccgaagggattagaactaactcgttggtgtttttaatgttttcagatagtaaaattacccagtgggaagatccaagactacagaacccagccatcactggtccggtcagtattcttatgtccctctcctgcatatagcttgtgactgcgtagtacacacacttcttgtgtgttcctaccgtgatgtccagacactggtgaaattgaatggtttaagattcaccccagctcctcagtgagctttccagatggggtacagctgctgggggctttcgagtggaactgggactagaaaggaggagaaaatggtattgggagcagtagcaggttgaaaggtgttcttcctggtcctttataaaaggatggtttaaaccgatagtcagaattgtctccaaccccccccccctttttttaacagtaaagcatcgttgttaacaatattttaatacaggcttaaccatgagaattaggagaaagagaagcactcggaaaaatagaaagatataccctgtacccaaaagtaggcgcaggccccttaagagagaaaaacactcctcccttcctgtttgtaggctgcaaggccaagccctgcatttataggccgctggcatttgttaggacagtgacaataaatgcatgctaatcaacctgtgcctcttccacctttaaaaccctgtggagaagaggttggaagctatggattgtgtgtggactctgctgatccaccaactctgcactagtgctgctcacgcgtgctggttaggaaatgtccatctgacttcgggccgtgagcccccgagatattgcggcactctgcagtcatggatggagggaaagtcctcttgctagtgactcactcatcggcaagtagtactcggtgagctaagggtgctgagaggccatctggttggccttttccattaaatgctcacttctgctgatttgcataattctgtttttttttttccttctgttttttcaagatgttctcccatatcctctggcctccaaactggtgattagaaatttgctgcagtaatgattgccatttcttggagggcaaatagttctctctctagtgattttttttttcaattttctcattattgttgatgttctgagagctcacagtcacgtgttggactgtgggtttccccttgtggatctcctcttcgatgcaggatcatccatgaggagggatgcatcagatctgtcctcgattctggcaaaccctcggccacctggtcccacacagccttccccgtccttactccacccgagcctttgcatcactctccatctttgttcttgtctcttagtatctccacttaaatccctgggtagagataaagttcctttgttggttccctgggcttaaggttagttttcctatactctttacagctctaagcctaggagcctgttacagcttaggtctgtccatgagacgccttcaggcaatgactcaacaagataaaacccatttctagcactgaatgttttatacggtctaaaatcagataactcagttttaaaatggggtaccaaattaaacagtgtttagatgaagcacaaatggctgagaaacacttaggtatttgacatccttggctctaagggaaaagcaaactaaaactacttttagatttcatcttaccctagtcgggttaggcgaggtcaataaataaatgacagtccgtgttggtgaggctgtgggaaaaggggacagtcacccactgcggttaagactgccagcttgtacagttgctatgaaatcagtatggggtccctcaggaagctgagaatcgatcttcctccaggtccacctctaacactctcaggcatatacccaaaggactctacctcttactactgagacacttgctcattcatgttcactgccgctctgttcataacagccagacattggaagcaacagaaatgtccgtcaactgatgaatgactaatgaaaatgtggtgcatttacacagtggaatattaaacagctgttaaggaaaataataattttcaagtagatgaatggagctagagccattcatcctgaggtaacccagagccccaaagccaatggcatggaatcttagtctgtgggtcttagcttttaaactttcagtgtgtgtgttcaattgaaataaccatagaggttagaaacccagtaagtggacagggaagaaaagatcccacaaggaagaggagagataaaggggaaactagaataagattgaatgggggaggggtggaagagcagggcacagggggagggggaagtgtggggagagactaaagattctttgaaaaaccatatggaaacctacgactgtagaggcttccaaaaatatatacacacgaaagaatttaaatggagtcaccatatgataggggaggcagtgttccaaatcaggctcatcttccataaatgaggaaaaggttttcagtgatgaggacatatcgtgaagctagctgctgatagagtctgtctaagctggcaggagaaaatgggaggtgagtggcgcccctgcctcccccacctctaaccccgatctcagtcacagttaatctaaccaacagtgtcatccaaatgcctccttggggcttcatggtcactgttccccatctgtttcctccatctctctcatttctgctcagagatacctcagagctgccttccctaggctcccacaaaataagcacacaccccccccctcccccccgcaatctctatcagctttccgcttcttaactcctacctctatctattcttttttggattaattgtactaagtagtagttttcattctgacatttgcatgcatgcatgcatgcatacctttcttcattcatctgttgcaggatatctaggctgattccctggcttgcctttctaattacctactttcctactgcctgtggccttctaccaccatgagctccaggagggaactgggaaaggactttgttttatgttgtcatttttttttaagcacttaaagtgccaggcagcgagaactttgaaaatacttgctgccaggtgagtgaggcaccagaaagagaaggtcagcacctcccaggtgtgaagaaaatgttgtttgtgaccggatgtagtgctgagagaacagaggtcatgatgacgtcaccttagctcgtgttagaatatgtctgaggtggagtgtagtgctgagagaatagagaccacattagttcgtgttaaaatccactgttcttgttctcctgctggtggctgtctatgtactagcaagtgttgaaagtcatacgggactccctcagatataactctgtccggaatgcatggcaagagtggtcggctctcgggctcatcacaaacccatgtgaaaacatgcctgcacacagaaggaagaccataggccttgtgaactgtctctagaatgttctcaagcatcctgtatgaatagaatgtcttcattgctcttgtattcgaaacaaatgacgtgaacttttctataaagaataggtttgggggggttgagggggaggctgtgtgatcatgccctaaaacagaatgcaaaggacagaggttttgctcttcactctgtctctctgtgggcaggaccaggcctgatggaaggtgctggaatctggggatgctttgctgagggttgggtacaccatggccaagttcataagtttgctgaaaggcaatgagttgctctgactgaggcagttgctgatacaatcattgtattgtatacaagatcagtccactttggttcataaatgaatcacagacctctacagtcacctccaggcagtggttggactccaggttttttcataatgaagcgtataaaggtgacttaaatagcctcgttcaaatactactttgccacatacttaaaagaacatacaagatgtacaagaactttcgacgtgttgtttacttctgagtcagggtcttattaagtggcccaggctggtctcaaattcatgatcctttgccttcgcctctcaggtgtcacctagacaggctatcaaaactttccgagacttgtatctcactgagaccttgagctcaccccggtgggccattttgtttttccacagagaaggtgcttgagtttaaacgaattctttcatacgtgttctggtttcatttcttttacagtgataaataacttggcccaaagccacccggagggacttacattccggatacaggccatcaagggaggagcttgagggatgctgcatgctggctcacacaggctcatgccttagctagcctccccatccaacccagaatcaccttccctgggaatggtgctgcccacagcgatctaagcccacctataaaaattgacagccaagacaatccctaggcagacatacacccatctgattcaggaaattactcaagtagacagctaagccaaccaggacataaagtaaaaggcaaacttgatgactcctcagtctaactcttttcaaaagactttgccgtttatgtagacttccccctcctcgaaagaggttatcagtctactgcccttcctgtttatggcatttctccacaagttcgtttgagttgcgttgttgctgttagtctcgtgatgctagggatggatcatgtccccattgcttcctgttttgagacagcatcttggtatatcgttcagggtggtcttgaactcactattgtcctgcctctgcctcctcctgagtcacaaatcagtagcatgggtaatatgcatggcttcccataaagactttttaaatgagcagtatttatcacttggggttgtgtgttaaattgccacatccaataacactcgcctccaggaagaggaagtgatacacatataaagatgctttgtatccatgtatctctgggttaccctgactcatactccagcaaaatccatatagaacaggtatctagtttgtgcggtgtgaccctaagagtttccttggctacaagtctgctgttgtgctgactagctctcatcccatctgagacccggtcctttcctgtgcagacattatgccagttttctgtagaaaacacagaatatgagtatttaaggttttgctgtccatgaaactttgccaacattggctcgctacacataagagtttgaggcatatgcttacattatctgtgcgtctggatttctcttgcaggctgttccgtactccagagagtttaagcagaaatacgactactttaggaagaaattaaagaagcctgtgagtaatgacgtcttctgaaagctctgttgtagcctgttcccatcacccgttagctcactgagaacagcatgcttgtggcttgtgtgtgcacacttccttttccatgccctttggcccacccagatctttgacctggattttccttctaacagaaatgataagtgaagactagcccagtgttacattatcaaatcaccgcaagggcaatttctcatgtgatacattagacgatcatatgattcttgcggattagaaaagaagaccaaagtcaagaaatctagggacaccacatggaattacacctctttatgtctgagatggcaattttaaccatataactaacatacatattttaacaaggtatatttttacaacacataattatattacttggtagagttgagcccaagtgtgattatcatcatcatcaacaacaacattttacaaccacgagacgctggaaggtttatacagacagtgctgagttgacagcctgtgcttattgttggcatgcctccccacccccaaccttgcgtcttctgtgttcattacctgcagtatggatcttagttttgctctcattttgcccagaaaattgatgcctttagccaaagaaagtatgagccccaatataattctttctttgcgtgagactgccaccctctgtctgctccctcccagttgatgttctaggtctgagctttgtcctgtggtaaagaagtactggtcacttctatgctcactcagaatctgtcttctgtcctatggttgtgactcaagttcttcatttataaccaaagagtttttgtcctcgaagctcacattggcacttacagtagtgtttctttgtgagttatccttgtgccctccagtgacgagcagctccgtgactattgtccttgtaagcaagcctagcctggacctcatccttccttgcagaaggctgtctgcacacctcactcacgtgctgggttacattcagtcgactctgagttcatggatgttttacccaaacttagtaggatgctggcccccactccccaccatagcaccatgaacttgcaggcagcatgccttgcatctccccactgcagttcctaccagagaagaccggttccagcttgcctggaggttataaagggttgattacatgggattaagtcttctctctttctttgactgaaccagcatcccaaggtgcctgtgtgggggaagtgcccttgtctctctccatagtggtaaggatgaggttttgggctcagtaggtgttcccctgaagattatgtgggtgattcagcctgagcagctctgaatggctacttcgctgtgtcccatcttgacacagggaggttctccctctgtgaaaggacaaacctataaaggggagactcttgggagccagctgtcactgcacatttatctgaaggccatcattgcttctgctctttggctattttcctggaaggcaggagcgtgcgcgcatgtgtgtgcatgtgcatgtgcgtgcgtgcgtgctgtggtgtgtggtgtatcatatgatcataaacttgtctttttatcttttatctaggctgatattccaaacaggtttgaaatgaaacttcacagaaacaacatatttgaagagtcctatcggaggatcatgtctgtaaagagacctgacgtcctaaaggctaggctgtggattgagtttgaatcagagaaaggcctggactatgggggcgtggccagagaatggttcttcttactgtccaaagagatgtttaacccctactatggcctcttcgagtactctgccacgtaagtgcatggaagacatttgcgctgtgtgcccttccctgcagctggtatagttttcttcttaaggaacttaacataacataacataagacaagaaactcacccatttgagatttcagtccctccctaccctaccaccctaacaagtctaaaaacaagttctgatccaacatggcgaagcactgtacactgtgaacgcctgaaactgattcttctcttgtcagtttggctcacagaactgaaactgaaattatgtcaggtgattatagagggagcaaggcagttttcagctatagtgccattctgatataagggaaaggtttgttagtgccagaattcagaggcatatgaccacgaatcattcctgaagtcacactacttaaaaggcaagtcatgaggatttgaagacccatgcttgggatacaaaggccaatgccctgctcccatagtagaaggaccaggctttgccttccatggggattcatcattgcctggcaagggaactgaggcaggctaaattgttttctcagcaaacatttggctcctattgtctccaggctgagaatgctcgagagcacgaggccgatcttgaattcccaatagaacagttgatcttggcaaaagatttagcattgctccagagtagacttcagttgatgtggcttctcctacaccttcctcctggtacctgtatgcttagggctcttttagaaggctgcctcgggacagtctccagttgacctagccttgattagtgaggttcttagggaggcttctgagagaatctactcgtaacaccactgaggtagaaagaggaggagccaaggtcctgacctctccctacatctcctagatacccccccatcactctatgctgcctggttgaaagcccctcatcctcatgattgtaaggccgacagggacccctgagtgtgctccgggggttgcattgtggacatggggctttccccagagctcttgaggtcaggtaaaccaagagacgaacgaacctttaggggaaaattcccagatcaaaagcctctcagaggaattaacttttgctcacagaaaccatctacagtagagcttgtgtgctggaggatctctgcacaccccttaccactgggagggttcccttcttctcaagatatctggttgacccacttgaaattgacattgtgtatgtgtctgtatgtatgtgcatgtgtgcatttgtaggtgcaaatgcacttgcatacgcgtacatatgagggccaaaggacaaccacaggcatcctcaccttgttttcaagacagtctctcactggcctggaacttgccagaaagctaggcagccagaaagcctccagggacccatctgtttcaacttcctgagccctggaattgcaaatgtgagctgtcacacccagcttttaaaaaatggtgtcctgaggatcaaaccaaaagccccaggtttgcaaggcaactgctttatgactgaacagccatccctaaaactgacatttctgtagataaaagttagctgactgaaagcagtttccatagctttacctgctccagtgaaccgtaactgtcaattacagaaaggcgtggctgactgatgggttacattccctagttcatatcggttgccacaaagtccccaaggttgcccatgcactgtaaaatgaagcaatgggtggcaaaggggagttcagcttcttggatttctttcatttaagtatgactggacttttctcttttcctccccaaagggacaactacacacttcagatcaatcccaactcaggcctctgtaatgaagaccatttgtcctatttcaccttcattggaagagttgctggcctagcggtgtttcatgggaaactcttagatggtatgttactccaaaatcttgtggtaatgaaagtaaggcagctctgtttgtgggtctgcaatcttgtgggtctgcagtccagtgtctgagcccacgtgtggatagtaagggtgtcacgggttttctgtagctggttttcctcaggaggttgaacccagtgtctccctccctgactcagagccccagcctacagtatgctggttgctgttttccccctaaccgtggtaacttctgatatagtcttgagcactgaagacaaagcatctatctatgctcatatgtgtaactgttaagtgtgacgaataagttgttccatgagtttttcaggacagctttcctctgctgagagcttgatccagctgacagatggaaattttaattgtaaagttaattaaaatgatctcatccgccagcagcctgctattgctccattttcccccaaatcagtttttaatgatttcagagtaacattatcactcagctaaggccttagccctagagtgtcttctgaagaagacagaacaaaagccgtgtccttaagaggaaatacagaactccaggacatgagaattgaggactcaaacctcacttgctcatgggttactgcaccaggtccttggccattcagtcccgacctcccatttacatggaaagcagttcattctttgattccctttgcagatacttaggggtatcaggggcttaaaactcaaccaagtttttgccatatttcaggattcttcattcgaccattctacaagatgatgctggggaagcagataacgctgaacgacatggagtccgtggtgagtaaaagcagtgcgtcctgtagccgtcacaggctgcctcaccctgtgcacggtgtcaggagctgtgtttgcagtcacagctgttgtcataggtacagtcctgcggaacataggtacttcacatgaacaagagggaggaatcgcttgcttgaaatttaattgatctcctgatttctataataagcaaattatggttggtttctgaaaaaacatggtacttaaggtcggtacgcctaagtctcaattcccacttaacgaactgagacttgatgagcagattaaacctgaggggcacctgaagcccgccgtagccttgctccccatctacagtgtgacaagattccaccttctgttttatgccttcatagaagtggtggaggcaaggccaaaacaatagtcatctagacatggtcgtctcgacacaggaattagtgacagctgcagaatgggagcgtgggatgagtgttagacaggctggcgctcacagggccccatgcttgctgcttacctggactgactgtccttggccaggaaagatctacgaaacaaaacatgtccttcttttcagaggacacttgaatgtctggctttctctatttatgtatactctgtagtgtatgtgtgtgagtctgtgtgagtgtgtatgtgtatatgtgtgtgtatatgtatgtatgtacatgtgtgcgtgtatgtatgtgtgtatgtttgtgtgtgtatgtgtgtttgtgtgtgtatgcatgtgtgtacgtgtgtgtatgtttgtgtgtgcgtgtgtgtgtatgtgtgagtctgtgtgagtgtgtatgtgtatatgtgtgtgtatatgtatgtatgtgtatgtgtgcgtgtatgtatgtgtgtatgtttgtgtatgtatatgtgtatgtttgtgtgtgcatgtgtgtgtatgtgtgtataagtgtgtatctgtgcgtgtatatgtgtgtgtatgtgtgtttgtatgtgtatgtgctcctgtacatatacataagtgtacacacgcacactggcctgtgtgtactagctacatttttgttcttgtagaagaattacagctctgttttcatgtggtcacttgagttagaaagctgtgcatcccttggccccgctggcatatggaccgtgtgtgtcttgggcagagctgtgaatgtaagcgatgcccatgatgccagctagagctcactgtgtttctgctcggtgctgcgggaggcgagagacgactattgcactctggacctctgtgacctctgcagactggctggcgtctgtaatctcagctcagtctcagtttcccttcgagcctcccctttgtcaatgctttctgcttctgctgtgccattctgaggagtctaagagcacagaaattgcttctgtgcgctcccaaccctcagtgaaggaagggggtcaagagaggattatcactgtgtatggggtctagcttggcttagaacacacagtcctccggcctctactcaagtgttgggactctaggtgttcaacactatgctgctggaaattgttcttaacgcccaagtctgtggttcctatcggccactagtgtttgggggagcttgttattattttgttattttaattactatgtattaggggagtggcacatgccaatgagcaccggtgcccatagagaccaggggcatcagagtttccctggagctggtgttacaggtgcttgtgagctacccagggtgggtgccaaggatcaaccttggatcccccaaagagcagcgcacattcttaactgctgagccatctctgctctcccagcagagcatttgtgttttaaatgtgatgtgcatataattttcggtctcctttgagcctgtcatattcctagcaatggagactttgggcatgagcagaagggacctgatagcctcatggctactctcttctaaaacacagctctgctttttacttaaattaatgggcaaagaacactgaagaaacaggaaaggacagagcacaaaaatgtatggtgtttagttagaacactgtcctacgtggtctctgatagtagactctgagaagacaggaagtcggtgtgttaaattctgtgtggacctgagacaggcatgctgtggccacaaacaatgcgtagccaggctataatcccagctcctggatgctgggtcaggaagaggagttggagaccactgtggggttcccaaacaagaccccctaactctccagctgctctaactcccctcccaagcaggtggccttcacagtagagaacaggggaagtcactttccacagatcttgtgttttacattagtgggaagatggggctcgagagatgactcagtggttaagagtgcatgctgctcttgtagaagacctaggaattaggttcctagcgtggccaacaaccagccacctataacaccagctcctgaggctctcacctgaacacatgggcacacatacacacacacacacaagtacacagacacaaaataaaatctaagtaagtaagcaggaagtggttttgttagagcagactccctgagtagcatcgcccttggacattgggcatagaattacattagaatgaatttattcataaaggagccagacagattttaaaattctcacgtttcctttctatgtcattccgataggacagcgagtactacaactctttgaagtggatcttagaaaacgaccccacggaacttgacctcatgttctgcatagacgaagagaactttgggcaggtatgtgggttcgtccagctcctgtggctcgtgtccctttgccgtggactataggacagcatggctagacagttagaaacagccacacagactttcagctgtcagcagcactgtgagcagcatttgactggcatgccaggacaccaggttccctatcatagaatttcctgtttccctgcaaagctagtaaattctaaaggctgctggggtctcaactagcacccccagttctaacagtcatttttaactttgcatctggaatagaggttcttcagaaagcagtgtgagtgttcgctttagcgggtccacatctggtcaggtaccagtgatgagccaggacacggagactttttcctctatggctctgttgttatgatgtgactcttacgcgctgagggttgttttgtttggttttactgttcttccctatatcaccagtcagtgtggattcgtcatagttacttccagagtggaagtcacctggttgggatcttggtggttactgtcagaatctaaggctgtgtacatcttaaatatggaaacttggggttagttgtcccctagtgacagtatttctcaggaggtatcttcaaggtagtatacatctacacaaaagcccaggcatgattccagtctctgcctggccttgggatgaactgaggagagctcacagtaggactgccatggggaaatcttgatctgcatggcttgagggaggatggagacaggtgtctgtggctcagactgagaggtaaagtcaggaattcagctccctggtgatgtagaaattatttaatcccaacccagggtttctaccccatctttaacccttttagttcccagataaaagacacacacaacctttatatttacaataagccttaaacagcacaagaactgggcaggtatctaccctctatgctattataatctactttcctatctataaccctgagttattacttaccatgtttcatctgggctgctctgaactcccaattggccagcccttagggccatgcttttatggctcagctaacccatggtagcttctttcttcctcttgcacctccttcttctccttgtggtcctcctctaaccctaaatgacacctaaaccccatctatatctcttctgcccagctattggctgttggcatctttatttactaatcagaaataactctggggcagggttacttagtatctacatgtggactctctcctctctggggcaaccagtcttggggggcgggggggggggggcatattagcattagaatacaagcagcatcaggccagcccactacctgctggcctcccaggttagagaaatcttagaggatcacagagggggaacacgcgatgcagtgaagtaggaagcaatgagtgaaactggagtgtggggttgcagactgaggacgtgatcgtggaaatatccgagctacatttttacctgcattccatgcattggagcaggaagccagccctaggcgctggcagtgggaagacctggaggactctatttgccttcccagggctggggaggttcatagaacaatgtcaggacccagagagaaggaaccttgtgactttatgttacacctcactagtcatccccgcccttgtcacaccctatgttgatgcttcatacccaagaaccccacagacagcgcctactgttcctgtgactgggggccttgtcacagggcagggagaaggcttgtcatggccctccacctccgagcatagggccttcctggctcctcccagtcctgcctgtcttctttgattctctgcactccctctgggaagggcctggaggccgggcatccatgctttctcttgtggctctgctcacagggctgtgtcacaccactgaccctctgcctgctcctttctagtcccacccactccacccatatgacctcatcccatttgcagctccaccactgtcccccacctgtgacccatatcttctccaattgtgctctgttcagccacctccttatggctcctcccaaagagcccaggctcctagcggtacagcctttgcctcctgtctgtctccacagtagtctttctcctcagtagtgaaggggaagtgtgattttgaggnnnnnnnnnnnnnnnnnnnnnnnnnnnnnnnnnnnnnnnnnnnnnnnnnnnnnnnnnnnnnnnnnnnnnnnnnnnnnnnnnnnnnnnnnnnnnnnnnnnnnnnnnnnnnnnnnnnnnnnnnnnnnnnnnnnnnnnnnnnnnnnnnnnnnnnnnnnnnnnnnnnnnnnnnnnnnnnnnnnnnnnnnnnnnnnnnnnnnnnnnnnnnnnnnnnnnnnnnnnnnnnnnnnnnnnnnnnnnnnnnnnnnnnnnnnnnnnnnnnnnnnnnnnnnnnnnggtttctcatccgtgatgttcctgaaatgcatgcgagcttcctgtcaccttcagtgtccttacaacttataaaggtcataaccccttacattctcatactacccagtcctcacctcactgtctgacacaccctccctcagctttacatgtaatggccctcttagcatgcccatatatgtgtcttggtgccacggtattgccagtaccatgtgccgtctccagacccgtgcattctctctgtcttagcgcctttcctaccctcctccttgtcatgggctgtctgtaaaccataagcagcttgaagcaccttgtcttagtgtcatccatgcacagctcataatatatacgcctactgcatgcctcctgagcagatatagtacacacccaaatgtagttgtcatctaattaatggtaggccttcgcaggataatacctgtgtttcacctctgcagctcaaatgccaaaagtcagccacttccctgggatgggacctaggtaatagggacatgcctcctggccgtggagttattgtgtctcactgcgcagttagagtttgtgttggaatgggacccttggaagtgctcagaacatcatccctggcgaccagtaacacaagtgaaacaggaaggaggtgacaatgctcccattaactaagaagctgcaccaaaccagacactattgtggatgccaagaagtgcatgctgaaaggagcctgatatggctgtctcctgagaggccctgccagagccttatacagaggcggatgttagcagccaaccattgtactgagcacagggttcctaatagaggagttagagaagggactgaaggagttgaagggatttgcaaccccataggaagaacaacaatatcaaccaaccaaactgcccagaactcccagggactaagccaccaacaaaggagtgcacatggctccagttgcatatgcagcagaggatggccttgtcaggcatcaatggaaggagaggtccttggtcctatgaaggctccatagatgccccagtgtaggggaatcgaggatggggaggtgggagtgggtgggtgagtggaggaaccccctcatagaagggggagggaggatgtgatagggtgtttctaggaaggagagaaactgggaaagggcataacatttgaaatgtaaataaagaaaacatctaataaaagggacaaaaggaagcagcagtagctgctggtgtccagaggttcaagaaggggacagtaaaataccttgctgtgtgtgcatgtgtgctctcggccacctgacagcagacccagttggcagagccacccttgccccaccttgttgccacggcctcattatttaatatgaatagtctagtctctttctttcaaaagcaattctaccagcttaattgactcttaataaaaataattaagccagcataataaaaacatacaaaaatatatgtctctcacgattccaccacctcaagaaaaatcacagtgagaatttttacttgtatcttcctgcattggtctgtgcacacccacaggtttgcttgtgtttgtttatggaagtaaaatgagatgccttcctacatcagtaaatattctgtgctgatttgatgactacaacaaatgtcatcttacagatgttctgtatattttatttttgcccttttggtggctacatagtcttctttggtatttactatataaactgacaatcctggtatatagcatcaactgtacagccctgggaataaagtatgtgcgtgtgtgctgtatatgccatttttcctttaacataatttctgagaaactgttaccaaaaggagaaaatggatacagatctagagacccacatgataggaggagagctgacctctgaccgcttataaaactaacaaatgatctctgtcttaagtaagtgtgcgtctttctgtcctttctttctacttggttttgttgttgttgctgatgatgatgatggtggtgatgatgatggtggtgatgatttattgagttttgtttgttttgtttttttttaattcttatatttttgctgcttgaaagaaattccatgaatatttctttgagtaacttaatttcttgtaacaaacagaattctagaatttgcatctctgggatgatggttgattggagtttggatctctgtggtctggatggatattctctggtgtttattttttttaccttgaacatatgttttttagggttggttggttggtgggtttgttnnnnnnnnnnnnnnnnnnnntcttaagtaagtgtgcgtctttctgtcctttctttctacttggttttgttgttgttgttgttgttgttgttgttgatgatgatgatgatgatggtggtgatgatgatttattgagttttgtttggtttgttttttacgttcttatattttggcctcttgaaagaaattccatgaatatttctttgagtaacttaatttcttgtaacaaacagaattctagaatttgcatctctgggacgatgtttgattggagtttggatctctgtggtcttgatgtttattctctggtgtttatttttttcactttgaacataatatgtttttaggcttggttggttggtgggtttgtttattgttttttggggggtgtttgtttgtttgtttgttttggttgattggttgtttgttttatggcttatttgggggggtgttgggtttttgtttgtttattttgtgtgtgttttgttgttgttgttgtttttttgtttttttcaagacagggtttctctgtgtagccttggctggcctggagctccctctgtagaccaggccatactcaagctcagaaatccacctgtctctgcctcctgatgctgggattacagacatgcatcaccactgcccggctcataatgaatttctttataaatgaataccacatgaaaatgttgctcttcttcactgttgctaatgtatgaagaataattaaaacccataaacaaccataaaatattcttcctctaatagtaacatcgttaaatgcataggtcttggaacaggtaaaagggttcgctggatactttcctgtacacagagcccattgccggaaaatgtttttgaataagctacacttctcttctatagtaagatgttaatcagtaataatccaaagagcttcatgttattgactattgttttggttttttttcctctaatcccagacataccaagtggatctgaagcccaacgggtcagaaataatggtaaccaatgagaacaaacgagaatacattgagtacgtatgcacgtacttatcacattttcttctagtgcgtgttgtgtgtgtgtgtgtgtgtgctgtgtgtgcctctgtgtctgcaggtatgcaggcatggggaagggacagaggtcagtgtcctgtcttcctcagtcactgttcatcctattcttatttttggaaatggagcctctcactgaacccagagctcatcaattcagccaggtagcctatccagtgtgctccgtggatttgctgtctccacctctatgcagaaggagcacacccctgtgcctggctttttggtttcttccatgggtgttgggaccagaagtcaggtccttccttacattcgcatggcaagcacttgagcaattgagccatctccccagtcctttccaaaactgcttgtgcatactgagaatgtgaacttaatatcattttgtttgtttgttttggagacaggatctctctattatgcagctctgactatcctagaactcactctgtagaccaggctggcctcgaattcacagagatccgtctgctgcaattaatggtgtgcaccaccacacctggcttctcatttaaacaaaagaaatgtcttttttgcttggcctactaggctgttaagtgtgggaaggaaattcaccctctctcatggcttctgtgaactacagcagcaaaaagaaagggtgcattatagtagcgtgccaggtcctcttcagggatggatagcttgtctgaaattcagaattgcagcagtggaaatgtcagatactaatggggtagaaattagggattgccgtgtgtgtgtgtgtgtgtgtgtgtgtgtgtgtgttttctatcctctgacttgctttccatgctggaaactgagggaaatattgcaaacatgctaagtcgatctgatagttgctgtgtctcaatgtaatctcagcctcttgctgtggaacaaatggttgagtccactcatcttcagtattaacaagtgttagtgtgggccagacacagtagcacacacctttaacctcagcactgggcaggcaggccctctctcaaattttttttctaaaatctcagtgtatatactatatggtatgataatatacccttaacaaccatgtgcgtaccgttcacttgcaagaaaatgagtggatatgagtgatcacatcctgacttttttttttttaattaagagatctttacatttttttatgtgtatgggagttctgcctgaatatatgtctgtgtaccagtgtgtggctggtgtccttggaggcaagaagagcgtcagatcccacgagactagggttacagacaattgtgagctaccacgtgggtgctagaagtcaaacccaggtccgatggaagagcggccagtgctcttaaccaacaagtcatgtctccagaccaccatctcttcacatctgtggagcactttgatcccctgaggtctgagataggccgggagactcactatgttcttggcaacctcagagcatggatgtctcatgatggtgtggtggtggctcttaaaggaatgcagggcttcacagtgggcgggcccaagcaagctgatccctgcctcaccctgttgttcagggttctctgttcatccctcgaaaggagcagcaggccccaggcataagaaaactagtatcagtggacgacaggggtgactaactgtgtgcctttttctctctcagcttagtcatccagtggagatttgtgaacagggtccagaagcaaatgaatgccttcttggaggtaagccctgctaatggggtcaggatggggacagagccatcacgggctgctcactctgttggccctttcccaagatgggactgttccatgacatgctgccttcttcttttctttctaaagtgttctcttgctttgcttctctccattttttatttgttttaatagcattgctgcttgcttgcttgcttgcaaacacagtttgtgtagcacatgctgccctgacaccaatggtaatcctgcctcagcctcctggggctaggattatagcgactggcttcccacctgtatttgtttgtttgccttgaatttatttatttatgtgtgtgcacacacaagcatgcaaacccacaggaggatcgcagcacaactccacagagttggttccctccgtccaccatgtgggtcccagggatggaacttaggtcctcggccttgatgaccagcacagttacaggctgaaccttctcaccaccagacgtttccacacctgctctagagccattaccttgaatttctaggagtatctggaggtaggagaagtgccagtagtggtacctgctactgtgcttccaaaaattgtgctctctctctcagactccccgacccaggcatactgaccttccctacagagccctcccctgtgtgactctaaacttcctgtagattgtcccctttttattctcagggcttttatgttatatccagatgccagctttctccctgtgatggaataaatgaagccaccacctctcctatgcatagtctaccacaggggacattccccaaccccttcgaatggagggggtctttaccataaaaagcatttcatgttggccaacgtgaaattcctttttaataatgatattcgttgtttaaaagcagcccgaaggactggtgagacggctcagcaggtaaaagtgttcgtcggtcaatgcaaagcctgaccacctgaggtcaagcccccagtgccactggtataaggagagaaccaactcttgcagagttgtcctccgcctccacacatgtgtgtatatgcacacaataaataaatacatgcatacatacatacacacatacataatacatgtaatatatcatacattcatacacacataatacatacatatataatatatatcatgcatgcatacatacatataatatatacataatacttatacatgcatacatgcataatacatacatacatataatatatgcataatacatatacatgcacacatacatacataatacatacatatataatatatacatcatacatacatataatatatacataatacatatacaggcacgcatacatacataatacatacatatataatatatacatcatacacacatacataatacatacatataatatatacataatacatatacatgcacacatacataatacatacatctataatatatacatcatacatacatacatacatataatatatacataatacatatacatgcacgcatacatacataatacatacattcacacacataatacattatatatatatatatatatatacacacacacacacacacacacacacacacacatacatacatacatacatacatacatacatacttacttaaaggaaaaacccagaccccctggtagtcatttccagagtcatttcctatttcctctctcatcaaacagctctcttaaactcagccctgccctgagcaggaagtgcacagacatcagggcctaaggatgtaagctgtgagggtgaacttggccttggcccattttgcactaagtttaaggaagaggtctgaggtagcagattcccagccctgcccagctttgggggaaccacagagttgagagtctcttcccgggtcaccctctaactaatggcagcccaggggccagaggctggcttgttttcctgtcagtcctaaaccagctcactcagtcctccacccatgccttcagcgtgctatttttaagcgtgcctctcacacatttgtggtctatgcacggacacactgactcacaaaagtgtgtcataagtggcttttgcaatccgactgcctacggcatccctcgtaccacagggtttcaaaaagtgctcaagtgctggaagctgctggactggacgcattctcacgtcctgtacaagacttgctattattggaactgtggccacctgacactgttgttgccgcgtgagccagcagtaaagagtgagctttatctgaccaactgcaatctcatttgatccaggaaatcgttctttttttgaagaaaagggtgcttaagatgtttttatcttttcctttcagggatttacagaacttcttccaatcgacttgattaaaatttttgatgaaaatgagctggaggtttgtgttatatttttttacataatataaagtacatgatcttaattaccaacttactttgtaagtggcattttgcattctctgacacatgacatattgaatgcacatggatggagtctagtgtgtgctctgttgtgagaccggtcttctgatctggggaggcttagcaatagtcgccgagtagacttgttgactgtgacagtcagttgtgcatttctagtgaagagagagttctcaacctgcatgtcccacaccgcttacatctgatcgatttccttgctagttgctgatgtgcggccttggtgatgtcgacgtgaacgactggagacagcactctatttacaagaacggctactgccccaaccaccctgtcatccagtggttctggaaggtaacgccagctctctaggcccagcctctgcttccggctcttcctcccagtcagggctgaagtcctgagctctgtgtgaggcccctgctgggaggtcagagtaggaccaccctcaggcatgcactgcctcatccctatatagaaatcattttctcaacttttttcccccatagccattttgatttttttttttatgtcttgcaaccaaagatgcaaattaaattcgatttaccatcccagggccagggtttctagtctgttgggctcagaaaagcttcggcaaagacggtaaactaaacaaaaacaaaaaaaaccccagctaattcctctaccaaaaaagagttttaattaaaagattatttacatataaaaaaggaaatcaggcctgcctagtagcatgtacctttttttgtttgttttagacagggtttcactatgtagcctaggctagcctcaaaatagagactcacctgcctcggcctccaaagtgagtgtggaataaaggtgtgtgccactaaaactagcagatgttgactttaaaaaattaggaaatcaactaatatgttctaacttctgaatgtctgttattatatgtcatgtgctgatgagatacagaggggaagaatcataattttcaaagattaggacttagctttggttttggattgtcttatagcggatcaaatcacttgcccaggaaagccaggtcagttccgggaggcacacagatcgggtcacaggcccatgtatgactctggtttccttctatttgtaaaatatcattggggaactttctgtggtcctatctcatcacttggcttccccttgtttagataagtctggaacactgctggttagaactggcttcagggagacaccagatctcaaacgcagaaacctaagcttgaccccatcaaagggttttctttttatatcatttattttggcctgctggcaaaagaaaaagagacccagacattctaagattagaaaggctgggattgtagcgactgttataaagggtgagacaatgccggtcttggtataggtgactccatgcagtgtaaacgagaatttggttgcctgcctgcgttacagcagggtgtggtatggtatgtgctgcatggtgacagtgaccctctgcctccgacaggccgtgctcctgatggatgctgagaagcgcatccggttactacagtttgtcacaggcacctccagagtacccatgaatggatttgccgaactctatggtgagtatggcatgccccagagtcctctgtcgtcctatgaggacccaagcaggcaatgaccagccatctcggcccctttccagaccacatgtatctgtattagttccacagagacccacggagatgcagaacagagggcttcaacccacaggaactgaggcggtgttcctacagagaccccctctctttctccccccaccccccttcttcattgttcaggttttttagtttggtttataaaaccagatttttcagaatcacccatatggttgaaagctccctcctcccagactgcagggctctttttgctccatgcatcaaagctttacattgcattactttcccctgaggtagaagccgtgcagaccgcactctgaggttccttctccctttccctaagtcccaccacaacttcgttctactgcttcaagcccactgatgcatctttttccttttctttttcttttgtctttttgcccaggttccaatggtcctcagctgtttacaatagagcaatggggcagtcccgaaaaactacccagagctcatacatggtaagtcacccaatcctcctgggggctggagaggtggtttccatttgccctctgcagaggacttgggtttggctcacagccctgacctggtggctcataaccatctgtaactccaggtccaggagatttgacttccacggggcaccaggtacacatgtggcgcacatacacgtaggcagagcatgcatacacataaaaatgaacctaaggctggcccggtctcaggtgccagcggggtgaagccatcatgggagcatagtacactgagctctgcccacccacagcttccagtgcagaagaacagttgtgtaagacgacaatgcaaatctttccataaaggggagcgaagcttaagccatgacttggatgggtccagtgtccttgtaggcggaagagtttaagtctccgtgctcccaggaatccccctaaaccatcttcccaactatttcagagcaggggctgctttgctcactgtctatgagtacgacagtccccggcctctcacacacttggactttttttttactctcactttaaattggttgtttcaaaataaggctaagagacggtgatggttctcctgccatcaagcctgacaacctccgttggatcactgagacccacagggtggagcgagagagagccaactcctgcaaactgttgtcccatctccacatgtgtgctgtggtatgcgcacatgcagacaacaaacaaatgttttctctttttttttagtaaaattaaggacaaaattccccatagcgacatcaatttaaatggccttccattcacacagtctgagtgacccatgagctgtggcaccatcatgtctctctggctggagagggaggaagaagttcaaggaattggcttgagaagagccacacaacacccaggacagggacagacaccgcttaggagattttatagcagcattcagcaagctccttctagtccaaactcagttgggctcccgtgtttctgcacaggctttggcttcccccttgctttgtagaaggaggagggtgtggccctgcctttctcagcatggtgagcatgctgagttgatgtgagcatcctttctcacccaccgtctcattctttaaatgctcttgggctgggtaagagagagcattactcaataggggtgacttgccttacttgacatcttttggtcacttgctcccaccccttttgcatatatcctgatccaaccctcccatgctcctgggagcatgtctctcccttttgcacttgaacagagtcagagaacttagatgacgtgcccaaagtcacagattgaaaaggcaggatttgaatttgccccgtaaacaaatagccttgatttcttgcagaaggcatccatccatattcaaagacctcattcttgaagggtgcgctatatcctccccaccccagctgaagccttgttgttaagtagcttttaaagaatgcagctctctctctcgctctctctctctctctctctctatatatatatatatatatatatatatatatatatatatatatatatatgtatgtatatatatatatatatatatacactcactggtagccaactgaatagcagaggtgactcagttttctggagcccagaatagcctgggctctgttctaaggtctgcaacactcctaggaatggggccccatggaaccttggccttaccctcttgcgtaaggatctgcatatattcatgactggggggaaaatatatatgtgtgtgtgtgtgtgtatgtgtgtgtatgtatatatatatgtatatnnnnnnnnnnnnnnnnnnnncatatattcatgactggggaaaatatatatgtatatacatgtatatatgtgtatgtatgtatgtatgtgtgtgtatatatatacatatacatatatacactcacacacacacatatatacatatacactcactcatgctcagaacacacataaccttagctgcttcacacctacaacagttgactcaggcatgatggagcagagatagtatgagtagtagtctgtccatccttcatttctgaggtgtgcatgcctcgtgctccatgagttttctttataaaaaaaaagggggggtgttttttttttattataactctgtgtgtgtgtgtgtgtgtgtgtgtgtgtgtgtgtgtgtgtgtgtgtggtgtggtgtgtaggaaggggtgcacatgctaccagtgtggtcagaagacaactctgcagtcaattctccctttcaccctcgagtggcttctggacattgaaccaagactgcaggcttgcctgctggaccatcttaccggcccacatgtttagtctgtatatgttggtgcttgtcttgtctttgaatctccctcccagcagcagcaaaggagtcatggacagttggaagattcctttcttttccctgttggtcgtatggcctgtttggcataggcactgtcatagctagaatttggctttggataataaaatgcgactgtcttcttaattccctagctcaaacagccaatgcctattagccaaaaccagggagtgctgctatggccaggagaatggcggcccctcacctctactttcctttcctttggcagctttaatcgccttgatttacctccatatgaaacctttgaagatttacgggagaaacttctcatggctgtggaaaacgctcaaggcttcgaaggtgtggattaaggaaggctccagcgtccggggcactgcccttccagcaagttccaagcgcacttttgcatttgccgagcagacttttgcagagccggtggcagaagcagtggcctggcccggctctggagcccagcttgtctgggccctgcccaagttccgccagggaacccagccccagctcaagtgccgccccctcaccgccaattctcaactggttgccgtgtacactgattacatttcaggaggacgtgttctatttatgttgtgcctctgcaggcaaagcccttaataaatattttgcatactttctaatgacaatgaatggaattaatcacgctacaggtatagtattacaactcatgtttactttttaaaatgatttagactgattttcagcttttatttcattacaattaaagatgtctcatgtacttggaaaagtgagcatattttttttttgtatttgaatttcatatcaagcttaatgtcagtgacatttttttatttttgaagtactttgacactcccagcctctactttattagaattggaagacgaatttttcttcaaaagccttctacagacaaatacttttgaaagaacttcaaatataacattaagcataatattttttccaaactcagaatgaaaataaactggatattactttttttttttttgtacaaatttagatactaagtccaggctggaagaattgtaacatagcatgatatctttgtgttaacttgaaaggactgaccccattgtcccttagaagtactgacgtgtgccatcacgcatttaagacaggattggactgtcatctcgcatcagaaaccgttacaatttcctgttgctgtacagcctcttctgaactctcttctctctttggtgttcatagagacatttccaatggcattgcttgattcaaaaccaaggaaaccagaaccattgatcttctatctctgtgattgctaagcagtagccaaataaccttcctttgctgtatctgcgtcccttctgaaggcactttatggaggtcacatctggttttgtttccattttttttttttttttcacgaatatcactcgtggcgattgctcctgcctccctgcacaagtctatccggtgcggtatctatcaggtgtgaacttggctgctagcgtatgaacccagatgtgacgcagagcctctgcagcgatcttctccaactgttctgtaatctctactcaacaataaggttttagttactgtatacacttaaccaagttgtgtgacctatgacctactttgcatgctctgatactgtgtgccgcccccacccccaccccccaggtcgtgtctgttgtgtgctagtttaaaagtgacctagaaagcccagtaggaaccacagagctcaagctgtctggctcaagtggtggaagagtgagggagtctgcagtttgtaagtctcgttctgttgtgttctgagaagatgcctgaggcagtatgggagtttcaacacccctgctgtccctttaacttgtattgtcctagaccctgtcctggaagttagaggacgtggggtatttttttttttgatctcttgccagttgtgaataagacagaaagactgtgttctctgttacgtaagaagggtctttggtagaagaaattgctcgtgtttacacagctgtggatgccatgaagaagccgtggacattcttggtgggtgaagccctagacgatggaatcctaccaagctgaacgtcggcttctatccatatgctatcgagtaattatagaagcaattaacactcactgttcttgcctctggtgagatatttttctcctgtagttaacagatattgggtggggggaggggagatacttttttttttaataaccttccaagtccagaaccatctctgttatagagtgtgccaaagcctgagctaagcagtgtattttaatcgaagaagaaaccaaaatctgttctaagaactggggttctatacctctgtaggccctttattgaacagcattattcactagatgcaaagggagccagcaagatggctcagtgagtccgggtgcttgtcacctagcctgacattctgagttcaatccctgggacccacctgataggagagaactgacttctacaagttgtcctctgacccaatagatttacaaacaaacaaacaaaagattaaaaataagaaaagaggacttaattctgatcttttctaagccaagagcagaaaagacttcttaaatccactccagggaatacttgaaaggcaagtcattgtgactaacacttcagttcattggcccatgatcatttcagattttaacagctgttactgttattggagatcggagagttggcctgttagaaattaaaaaatacagtacagcttgccgttcctctggtttgtgaagtttcactcgttgcctaaaatgcccgatgcctcgtctccagaccttgctgcccttgcctggtcatctttgtacagtaattgtaaatggcagtggagactatggtgttcctgaggggcaatggcaggtcactctcccgatctccctactaccagccaggtgctgtttccttctgagctgtggagatcacaccatcctgtcgccctgcagataattgtggatcatttaccttgaggctgcagagtgggttccaggactcttacttcactgtggagggacttcgagcatcaggtggctctctcatgttcctgccccctttactccatgccaaacttgggattagacagcctgctggctccagaaaaaaggtcttggtaggcattagtctatcctaggtgcccccagtgcactgtccttgtctgtctgaagcacccatctctaccttccctggccagtcctgacggttcacaagggccagagatatggacttcatttttgttcccaggactgatgtagcttagtggcaagtgtctccctggcatgtacttagctgtagatttgatcctcattgctgggactggggacggggtggataagaaataaaaattctgtttctgaggacctttagcaagagacagaaaatcctgccattccagttggaaattatataaaccaacatgacaagaactgtttccccccaaaaggcccagcagctgacttttagaagtgaggttcaaagtctttaaccacttctgaatctcatatggcctgttgctcttgatcttgctagactccggtttgttctaagagtcaggcttacgtagtatagcagcttctagccagttctctattatcctggtaatattgtttctcagctctgaaatttgaaagtctacgaagaaagcctgggttcatcagctgcccagccccacctctccactgagcgctctccatctccctctctccctctctccctctctccctctccccctcaacagaaggaagaaggctatctgttgtcattctcttcctggccagtaggagtgctgctgtgcagggtcactgcctgccctgctccctctctggctcccagaagatcacatgctacctctgtctcatttacaaattggggtatatcctaagtcatgtcaaactgccgatttcaggactgggatgtgttttaaaaaaaaaaaagagaaaaaacaaaaaacttaaactccactttgtaccttagattttaaaactgggtagaaatgtaatatacattggaccacttttttaagccttaatgaacagtgtatatacatctgtgtatgcacactccaccccagagtgttttcagtgtgccagagaagcagctgtagcgttaggacatgagcctgtctagtgtttcctaggaaagggatagttttctgttggtatagcattttctaaggaaactactcactcagcgcctaccctttgttagaagtgttgacgctccaagcacgcgtgtgaagcaccatgtatcttggccggtttcatatttgtaagaagcaccggtaggaacctaagagcatcggttggagtgtgacctctgatgcccctgcattcccgccactgtgtctctgtgtattgaaagcctctcctgtgaccacagcctgtgttgacagatgtctgtcccctgtgcaagccagtctgggcnnnnnnnnnnnnnnnnnnnnnnnnnnnnnnnnnnnnnnnnnnnnnnnnnnnnnnnnnnnnnnnnnnnnnnnnnnnnnnnnnnnnnnnnnnnnnnnnnnnnnnnnnnnnnnnnnnnnnnnnnnnnnnnnnnnnnnnnnnnnnnnnnnnnnnnnnnnnnnnnnnnnnnnnnnnnnnnnnnnnnnnnnnnnnnnnnnnnnnnnnnnnnnnnnnnnnnnnnnnnnnnnnnnnnnnnnnnnnnnnnnnnnnnnnnnnnnnnnnnnnnnnnnnnnnnnnnnnnnnnnnnnnnnnnnnnnnnnnnnnnnnnnnnnnnnnnnnnnnnnnnnnnnnnnnnnnnnnnnnnnnnnnnnnnnnnnnnnnnnnnnnnnnnnnnnnnnnnnnnnnnnnnnnnnnnnnnnnnnnnnnnnnnnnnnnnnnnnnnnnnnnnnnnnnnnnnnnnnnnnnnnnnnnnnnnncacacacacacacacacacacacctcctaacgcaaagctgagtgctatttgatacaatagtcaaaaccaaactaccttgacatttttctaagacagcttaatggctgatgctcgtcttcacagcccgtggcgggctttaacgtagctcgaatctggtacacgcataaagttttacggtcaagtccttttctttcttcttgagagacctaaagagatactgtagcttgtttttctgatggcaaatgggaactgtgacaaagtgaagtccttgtaaagcggtgatacaacttgtcaaatatttaataaagaattacggaagctggaacatttcctacataagtatcatgggttgtctggcttaaagcttcttcaggaatggttcatttcaatcacgtcagatatttaaatgactgcagattttaggtgtggtcatttccttaatctgttatacgagccccaccttagcgatggagtctgccctgagttctcattataaggctcatttgcccccatgcacatgctgggttttgtctttttttttattaaacctgagcattgcccgctttatacagcactcatggttttatcactccatccccaggaaagcaaactgacttcacctctgcttgccagtgtgccccggactgggagacggtgaatgacattagcaaccaagccacggtggttctcagaaagatggtctggatatccagatgtatgaaaggttttccactaaaattcaatctcttgggactggagagatgacccggtggctgcttttcattagccaattagtgctttcccagaagtcctgagttctctaccggggctccttgggcccagggctggatagaaggctcagtgcctcaaagagtgtcctttcagcactgcacctttgcagtggctgcccagaggccaccctccctccaggttgtgccctgtgctgtggtgtctctctgttcttttctacttctgagcccaagctggctcaggctgccttccctctggctgcaaatcccagagcaggaagggtggccctgggagatataaggtgagtggagactgtcacctgcacctccagtagagtgccttgaccctgctgaagacaacccaagcttgtcaccttaggggtgctggcctcagtccttggagacatgaaccctgcaatgttacttcttgttggtgctgctgaacttgccagcacgggagctgatggcctgttctaagcacctctataggccctatccccagatgctggtagaaaatctttgtcctctgtaaagaaagggcttaccttacaaatcagttcaggggtgtgggggagtctagagtagccaaggggtctaaagggagagttcagatgcggtaagagaagcctattgcttgggagggaccttggttagctgcatagagcagcccctggcatcactgcatccctggcttggattgtcattccagaatgctccttcatgccacctccaagtcagtccccacccctacatctcaaagtccttctgaattttccctaacacattggctttgtcttatctagaatttcccgtagaaccatataacttactccgatgtttgtttgttttttcctagttggagtagctgtgactctttaacctcataacatttactaaaccagacctgaggatgtagctcagttggcagagtgcttccctcctatgcacagaagtcctaggtttgggtcccataactacgtaaaacagcataagcgtgcatgtccgttaatctcagggagaagcagaagttcacatgtcaagttcaataccagtgtggcctactcaagaactcagttcaaaaaaaaaaaaattttttttttgttgttttgaatgggagcccgaatagcataatgaatgggggagggagtcaatttaatattcagatagtttaccgatttcacatgaagtgggtcagtcaccactttcagactagatagtcaccttgtagattttaaagcttacagtgatcctggccttcaggttgaaatataggtttaccttgcagtggaagttcccaaggaatcatagatggagtgaggattgcgctccagatttctagatcttgtctcacttcttctctctgaaagatcctcgagtaagaggaaatgagttcattagggcagattaacacagtagcaagcagtgtgaagatggcatgcaggggcttgcttgacagaagcttatgtcccacaatcctttgcaggtttaaacaggtactccattctgttgtcattcaggtgcccaggcaccctccctcctcagccccacaatccccacaggatgacagagcctggggaaggaagagtctggggggtggggcatgaaagcaaaccccctctgcccaggtcccctggccagaagcaggaccatagctgtagctagatgcagaggagtctagagacaatcctgcagagatggtttctcctggaaacagaggccttgccgccattcaccaagcctccggagtcttccgtttactctctggactctgctgcatagttcatggatctctgtttgagcccagtgataatgttagcacgaatttacgtgcaaggaagtgaacttgcagagcagaactagaaacccaggttacctgggtaagaggccaccactcaactactgactgtactacctagcttccagctagtccaccaaacattccgaaggtaaaaataccaatcaactcatttatactaggatgtaaggatccagttagctagacacagaagtagttttattttaacaactactaaagatgatgcttagttcaaaaataattttttttaaaatcgaagttatgccctttagttaccaggacagtgagcagagaaggttttggtggacaaaggggtctatttcagccactaaatcattgcaaatatgaagtatctacacaacttgaaagaccctgtcccagatgctggcctccagcatgaagccagggcctcccaaaggacatgtaaacatccttttgtgcaacagaacaaagagccaaaggggctagacatggaaaactggaatttccactctaaaaaatgcttggtaggggcaccacactgttgtatttgtagaagagtttctatctgatgacaaattttagatgttaacttgtatttaagtactgctggaagcctggcacgggctatgcctgtcacctagcttttcctttcagttctaaggcctctgccccggagtcctcctccttcagtccttcctgctgggctgcagtctctccttggccctctgtcctcttctgcacggtctctttactttagacattcctttgctggcttggcagtgacgttgggagaggccggtggacatgtcatcctcatatatcgagtgtgtaagcaacagccaggcctttgaaccctgggttccagttaaaaagtaacacactagatgctggatcaagaggagacaaatattagctttggaggcggagagcctcatcattgagaaatgtctgctgttggcaacaggaagagagcaatggtcacgccagagtgggggatccaggaacccccagattcctgcgaccttaggctagacactctattcttttatttaaaaaaaaaagtatttattttcaggtgtgggagggggacttgccacactggacatatggaggtcaatggacaacgtgtaggtgttagttctgtccctgtacaatgtgggtttggaccagcaggcttgacagcaagtaccttcaccagatgagccacctcttggcccagacactgtattctacaagttgaacattgaagcggccagtccttaagttccctcctagaactcccttaatctgagagccccaggactgtcctgtgaccactttgtgcctctgtcctttgtcacctcgatttggcgacccagttctgtcacttgtttgcagccaagctccgctgcctgctaggagcttccatacatcttcccactctcctgcctactgcctgagtcactggagatgtctaggaggacagcagagtagcaggtctccatggatcaaacccaacagctccagggatcaaacccaacagctcaacagcctcgggccccagagaccactcctaccatgcttctctgtggtttccaatgaccctccttatttaatatgccactctcaagcctctcctctcaaaatatacatgtgcccacaggttgtccttagtaggcttgctatctccccattgctctccttccctgctacctctctttccgtcacaggtccctggggactgtcacatctatctctagccccaacctctcttcagtctctcatctccaaaaccctaatagacactatcaacagacatctccaagtctctcaaactcaaaaatgtagccctgacctcacaccagaaactccatcaatggccttccatgcatctttgatccccaagtaagaagtatggcaaggtagggttccttcccgtgctttcgtcattcaccccacagttcccagaacatccggtgcttgggggcaccaggcaggcacgccagcaatgaaggagagtaagacaactcctttgtatctcatgtctgagtggaggcaaacaagtaacatgtaagtagatacaatgtatgtggtgttactaatgaagccaaggcagacagaggctgcaagtagtgtaagtagagtttagatcctatgacaaaacaagatggagacctggaagcagtggaaaaagccaactatgggtccactggagcatgaggttgaggagcaccctcagcaaaggccctaggtggaggcagagaaaactcaagttagctcagctagagcccacttagaaagggaaacccagaagtttgagtagggccaggccaggccttgcaggattttcatgtcataagcacataaatggtattaatgacttttaatttttcatatttaatgtttgggagacagaggcctgctgcatagcttagattgttctaaaacttacaatcctcctgcctcagtctttcaagttctgggatatcacgtataactacacacaatagcatagacagcattttaaacttctatgaggcagaagggggggggcggggagacaaagccagaggagtggccagagaggtagcagggaaagcagaaaagagtgcattctgggcactgaggcacaggcattcatcactggcaatggggagcatctgcgagttctgatggctggccagagagacaagagcttaagtggccacggtaactggcaacagggtggcccagtgaccttcacaggaacggcttggtcaggatgctgacagtaaacacctgatgaaagagatctctgcaagaaggggagaaggcactgggtcagcagggacttgtgcaacagctagcacaccctcgctccttctgtccccgcagccttcgacctcacattcttctgcacgctccacccaagtgtgacagtcacctgatgacagtgtctcactatctctctcctgattctctcctgtgcccagtttgcacacagttcccagtctagtcagaatctgccatccgcctgcccatacagagacttgccaatatccaccaggaaaaacccgaagcccttctcctccatcttcctacagaattcagaaggcaccatccggacttagcccatgccatggttccttcctgctttggctcgctctacaaactctccaaggaacggacttcccacgcatccaaaccaagttcctgtcatctcttcaatgtcactttatcctccagtcctttctgatgacccactaactgaagcgtcacacttctttggacttatagacctttgtcactttccacctgtagtctaattgtctcagccttacccgacaccaacagcagactagggg

SEQ ID NO: 100 - DNA, 3326 bp, Mus musculus
tgctgttgttaaggaaaacagaccaaccatctgcatctagaccagccttcctctccctcgctcccttttagaggaggttttcctgcctggaatctgcgacccatacgtgaagctgtccttgtatgtagctgatgagaatagagaacttgctctggttcaaaccaagacaattaaaaagacgctgaacccaaagtggaatgaagagttttattttagggtaaatccatctaatcacaggctcctatttgaagtatttgacgagaacagattgacacgagacgacttcctgggccaggtggacgtgcctcttagtcaccttccgacagaagatccaaccatggagagaccctatacatttaaggattttctcctgcgacctagaagtcataaatctcgagtcaaggggtttttgaggttgaaaatggcctacatgccgaaaaacggaggtcaggatgaagaaaacagcgagcagagggatgacatggagcatggatgggaagtggttgactccaacgactcagcttcccagcaccaggaggagctcccccctcctcccctgccgccaggatgggaagagaaagtggacaatttaggccgaacttactatgtcaaccacaacaacaggagtactcagtggcaccgacccagcttgatggatgtgtcctcggaatcagacaataacatcaggcagatcaaccaggaggctgcacaccgacgcttccgctctcggaggcacattagtgaagatttggagcctgaggcctctgaaggcggtggagaaggccctgagccttgggagaccatttcagaggaaatgaacatggcaggagattctctcagcctggctctgcccccaccgcctgcctccccagtgtcccggaccagcccccaggagctgtcggaagaagtgagccgaaggttgcagatcactccggactccaacggggaacagttcagttctctgattcagagagagccctcgtcaaggcttcggtcctgcagtgttaccgacacggttgctgagcaagctcaccttccaccgcccagcaccccaactaggcgagcccgttcgtcaactgtcacgggtggtgaggaatccacgccatcagtggcctatgtacataccacgccgggcctgccttcaggctgggaagaaagaaaggatgcaaagggacgcacatactatgtcaatcataacaatcgaaccacaacttggactcggccaatcatgcagcttgcagaagacggtgcctccggatcagccacaaacagtaacaaccacctagtcgaaccccagatccgccggccccgtagcctcagctcgccaacagtaactttatctgccccactggagggtgccaaggattcacccatccgccgtgccgtgaaagataccctttccaatccacagtcccctcagccatcaccttacaactcccccaaaccacaacacaaagtcacacagagcttcctgccaccaggctgggagatgaggatagcccccaacggccgacccttcttcattgaccataacacaaagactacaacctgggaagatccacggttgaaatttccagtacacatgcggtcaaaagcatctttaaaccccaatgacctgggccctcttcctcctggctgggaagagaggatccacttggatggccgcacgttttacattgaccataatagtaaaattacccagtgggaagatccaagactacagaacccagccatcactggtccggctgttccgtactccagagagtttaagcagaaatacgactactttaggaagaaattaaagaagcctgctgatattccaaacaggtttgaaatgaaacttcacagaaacaacatatttgaagagtcctatcggaggatcatgtctgtaaagagacctgacgtcctaaaggctaggctgtggattgagtttgaatcagagaaaggcctggactatgggggcgtggccagagaatggttcttcttactgtccaaagagatgtttaacccctactatggcctcttcgagtactctgccacggacaactacacacttcagatcaatcccaactcaggcctctgtaatgaagaccatttgtcctatttcaccttcattggaagagttgctggcctagcggtgtttcatgggaaactcttagatggattcttcattcgaccattctacaagatgatgctggggaagcagataacgctgaacgacatggagtccgtggacagcgagtactacaactctttgaagtggatcttagaaaacgaccccacggaacttgacctcatgttctgcatagacgaagagaactttgggcagacataccaagtggatctgaagcccaacgggtcagaaataatggtaaccaatgagaacaaacgagaatacattgacttagtcatccagtggagatttgtgaacagggtccagaagcaaatgaatgccttcttggagggatttacagaacttcttccaatcgacttgattaaaatttttgatgaaaatgagctggagttgctgatgtgcggccttggtgatgtcgacgtgaacgactggagacagcactctatttacaagaacggctactgccccaaccaccctgtcatccagtggttctggaaggccgtgctcctgatggatgctgagaagcgcatccggttactacagtttgtcacaggcacctccagagtacccatgaatggatttgccgaactctatggttccaatggtcctcagctgtttacaatagagcaatggggcagtcccgaaaaactacccagagctcatacatgctttaatcgccttgatttacctccatatgaaacctttgaagatttacgggagaaacttctcatggctgtggaaaacgctcaaggcttcgaaggtgtggattaaggaaggctccagcgtccggggcactgcccttccagcaagttccaagcgcacttttgcatttgccgagcagacttttgcagagccggtggcagaagcagtggcctggcccggctctggagcccagcttgtctgggccctgcccaagttccgccagggaacccagccccagctcaagtgccgccccctcaccgccaattctcaactggttgccgtgtacactgattacatttcaggaggacgtgttctatttatgttgtgcctctgcaggcaaagcccttaataaatattttgcatactttctaatgacaatgaatggaattaatcacgctacaggtatagtattacaactcatgtttactttttaaaatgatttagactgattttcagcttttatttcattacaattaaagatgtctcatgt

SEQ ID NO: 101 - protein, 946 aa, Mus musculus
TSLPLPRSLLEEVFLPGICDPYVKLSLYVADENRELALVQTKTIKKTLNPKWNEEFYFRVNPSNHRLLFEVFDENRLTRDDFLGQVDVPLSHLPTEDPTMERPYTFKDFLLRPRSHKSRVKGFLRLKMAYMPKNGGQDEENSEQRDDMEHGWEVVDSNDSASQHQEELPPPPLPPGWEEKVDNLGRTYYVNHNNRSTQWHRPSLMDVSSESDNNIRQINQEAAHRRFRSRRHEDLEPEASEGGGEGPEPWETISEEMNMAGDSLSLALPPPPDVSRTSPQELSEEVSRRLQITPDSNGEQFSSLIQREPSSRLRSCSVTDTVAEQAHLPPPSTPTRRARSSTVTGGEESTPSVAYVHTTPGLPSGWEERKDAKGRTYYVNHNNRTTTWWIMQLAEDGASGSATNSNNHLVEPQIRRPRSLSSPTVTLSAPLEGAKDSPIRRAVKDTLSNPQSPQPSPYNSPKPQHKVTQSFLPPGWEMRIAPNGRPFFIDHNTKTTTWEDPRLKFPVHMRSKASLNPNDLGPLPPGWEERIHLDGRTFYIDHNSKITQWEDPRLQNPAITGPAVPYSREFKQKYDYFRKKLKKPADIPNRFEMKLHRNNIFEESYRRIMSVKRPDVLKARLWIEFESEKGLDYGGVAREWFFLLSKEMFNPYYGLFEYSATDNYTLQINPNSGLCNEDHLSYFTFIGRVAGLAVFHGKLLDGFFIRPFYKMMLGKQITLNDMESVDSEYYNSLKWINDPTELDLMFCIDEENFGQTYQVDLKPNGSEIMVTNENKREYIDLVIQWRFVNRVQKQMNAFLEGFTELLPIDLIKIFDENELELLMCGLGDVDVNDWRQHSIYKNGYCPNHPVIQWFWKAVLLMDAEKRIRLLQFVTGTSRVPMNGFAELYGSNGPQLFTIEQWGSPEKLPRAHTCFNRLDLPPYETFEDLREKLLMAVENAQGFEGVD

SEQ ID NO: 102 - DNA, 272022 bp, Homo sapiens
  misc_feature (1)...(272022): n = A,T,C or G
agaccctcagatacatttctgtcagtaccctcagttacatattttgggagacgtaatacttaatgaaccaaaactctgttttgctggcagggaaaaaaattgggctgatacaatcaagataatcctatcaactttaggattattaggaatgttgataatcctatcaacattctatcaactctgtaatcagaaaaatatatttaaaataatgcgtgtttgttaaaaataaccaaacaaaatacagaaaaaagcaaagtaaaaattgacaatcccctaactccagtgttggtagttagggacagaagaagggtggaggatgtcttttgtctgtgttacatgattacagcaaaagtcactcttcattctggtagagccatagaaatctggccgagcagaggcagctgtgcctgaggagcctgacttcgaatcagctgtgttcatctttgctaacctcccaaagggaggaagctcaggaaaccaccgtagaaccccctaaaaggggagggtggctacagctgagcaggtgggggcaggcaggagtggagagaggcgaggatgatgagtcaggcaggtgagatggaggctttgtaggttatgttaaggctcctagacttagcatttcaagcagggatgtgacctgatcagatttatattttgcttgcattgctgatggacattggttcagtgctcattgtactggaagggtcaagaatagaggcagggacccaaatttagggggcttcccagggaatccaggggagaggtgttgtggcctggactagatttggaacatccagaaggggactggagcaatgacatacctatacctagtcccagagggccccgatctagctaaggacagagcgtgcagtcttgcagctgctgggctgatgacatgctggggagtgtatacctgggaaattctggtacagagataaaggaaatgctcaagcctccacctatgaatttgcccggtgattaaaatcatacttcctaagctttatagaagccctctgtttgtcccacaaagggccactagcacaaggaaatacataatgtgttcccttgtcattttataaaaatgtagactggtgctgcctgctgtgaaaatgccagtcaggttgcttccttcatagtaatcagtggattcttttgtccatttctgagtggaggattagccctctgtttgccccacaaagggccaccagcacgaggaaatacatagtgtgtccccttgtcattttataaaaatgtagactggtgctgcctgctgtgaaaatgccaatcaggttgcttcctttatagtaatgagtggattcttttgtccatttctgagtggaggattcctttccataacgtggtgtatttgcagtgtttctctcagaggaggagtgcctttctggtgtcatctgtcctgttggtggcagagttctgctgctgaattaaacctttgtgtcggccttggccactcttatggctctgctggaggtaaagccagtggagtggccttgtggcatttgctccaagttgttgctcatttttctgagattatcagaggccttagagggaagcattgaggatttcattatgctccgataactatcacgttgtcaataatatggttctgataagagtgatgggggatggtggggttttgtgagttgacagacgtgggtttgagacccagctctccagtcagaagccagcgccaggcctgtttctcttctctgagttttagtgtcctcaggtggaggggaggataatattaataacaccttcctgatgtggctccactgggctggccacgccatgggcacccagcacggggtggctgccctggttcgtgttaaccatcagcagggttggagagctccctccttactggtgttggaggtcattacctggcgggggatgtggtagataaagcaccttttattgtccctacacaaggcaactatggggtaacacaatataagttattcagattagagaaaatatgaactcttgctacagtgttactgcagacaggcacatatggtttgttaggatgacatttaaaaaaagtcattttgagttacagaataaaatcaaacaaaattcctttaatcaccagggctgggatggaaataaggcaaaatgttgattcctttgaaagacaatttttgggttttttttgttttttttaaaaaaactttatgtgttgatggtttactctggtctagtcgttcctactcctattctgaaagcaggccttgaattcctgattgtgtacaggattgtgtacaaacaatcaggaattcatcattcatatgaagaagttctgtttttccctctagtgtcatgaatattttcatgtacgtatatgttatgtgactagtgttaagaatgcatgtattatatatgtgcatgcgtctcatttacattgaatgtagctaaaaggaatatttgaaaagtataccttgcctgtctccaatttctacatttcaagttaaaaatgggaaataatcttagaatccatgcctgtggttcataagcctggctcagctcttgcattcccagctactgtctgacgaaactcacaggagctgtgaaaacaacgctgttttgtgaaagccaagtaggagcttagggtcatggcaaacttcagagaaatgtaaaggagcaggcactgtgggttttgtctaccccacccccccgaccccaccgccttccaaaatttctttctttttttttttttttttttttttgagacagagtctcgctctgtcacccaggctggagtgcagtggcgtgatctggggtcactgcaagctccacctcctgggttcacgccattctcctgcctcagcctcccgagtagctgggactacaggcacccgccaccacgcccggctaattttttttttattttttgtagagacgggatttcactgtgttagcccgtacggtctcgatcttttgacatcgtgatccacctgcctcgacctcccaaagtgctgggattacaggcgtgaaccacaccgcgcccagccccaaaatttctaattgaattttaaccttccacttttaagttctgatcctgatttataaaaacctatgtaattttcttcagctttcagaaggaatgtcttgtatcttcctatgggggtgttgggggaactgatattgacagaggtcctctgacatttgatagcctggcaaatagggtcaaacatgttccagacctcagaggattgctgaggatagctttctacttaagctagataaaagaagttttgggaatcttaccttgcactctgttttgtagaaacaactgtgtttaatatatttctcattactggctgaatgacctgtatgtgttcaggagatctctctatttaccattttaatgccacatatttaatgagcattcaggcccagactgtgaagactctggaaatgagaattttgtttcctatctcctgtgctgtaacaaaagcagcttaaaaattgcagtgtatagacctcaccttttatcatttttttttcagatttttaaatattaatattaagggtctttatctcagatgtttgttgtttaccaggtcatcagtatctggacgctggcagggtccttagcaatggagggagggagagggggtccagcctgcatgattggatcagtgttgaacctgtcccacctgtggggaagaggcagcatgcggagcagacaggtgcctgctgcaggtcaggagagctggccccaagtcctgacttggagggaaatggtacatattaatatcctttagtgccaggtactggcgtagctagtttatatgcatcacttgagcccccttgcatcactggcatcacttcaagatagacaacaaggggaatgcacatcatatccctgttcactggcgttcactggtagggaaactgaggcttaataatgtgcccaggtacacacagctgataagtaaccctgcaccctcgatctcacagcatgacattggaatccacctcattagacagagctcagctgcctattctgtcaaaaatgttgagttgtatcagctgcagtgtctgtagtattcctagacatttctgtgattctcataagtatctttgaaagggggccatttagtttatttctgcatttctcccttatctgccgaaatgcccgcaggctctgggacaagctgtaaagctctccgtgttatgctgtgttgcaaacccagtgccagtaatgatgcagtgctatttaaagataagaaagcaagctcacagagggagagcgcagcaggatgtttatgttccagaagcataaacacatgacctgtgcccgtcccgtgttcttcgtccatgtccccagagaggccgtggatgggatggtgcaagaaacccatcaggaagcagaattaatccttcctgcgggtggtccctgtgaagaagacacagcggccggtggtgtgacagcccacagctgtcgaaggaagggagaagagagggaccgagggccagcaatagggttttacagctacgtgctaggttgtctcacatctaggaaagagaatgttcatattatatagaaatgggcattttccctgtggcctgatatgaggtatccagaatattcctttaggtattattaagtcataggtttctgttttgatagaaacagcaggtggttcagttagtatttttgttgttgtaatagtagcttagatctcttgtttttgttttctttggccaagacagaaaacattctgccacacacattacttcatgactctggttatatattgagagcagcattaaaaaaaaaaaaaagtccaatttagtccattaggccattcttgcattggtataaagaaacacctgagactaggtaatttataaagaaaagaagtttaattggttcttggctctgcacgctgtactggatgatacaggatgcatgatgctgacatctgctcggctactggggaggcctcaggaagcttctaatcatggtggaagatgaagggggagcaggcatctcacgtggccagagcaggagcaaggggttgggtcacacacttttaaacaaccagatctcatgagaactcaccattgccagaacagcaccaagccatgagggatccacccccatgacccaaacacttcccaccaagccccacctccaacaccggggattattgtcaacatgagatttcggggacaaacatccacactatgtcgtagccttaaggggatcttacctctttgaagcattgtagagttcagagagtaggacattttgtctactgtattttaaaatactaaatgttctgattatgaaagtcagtcctggaaaaaaaaaacaaacaaacctgaaaccatagatgaagataaggaacaaaataaaaattacccacagtctccctcgcgtgtaccgcacagttcatgttttagtgtgtctacacaccatttaatgcaggtggacagactcaggggcaggtgtgccttgctactgctatgtccacagcacctggcagagtccctggtacagcataactgctcagcagttgggtgctgagtaaatattaatacatgtgcatgtggtaccagtcagggcccaacagagggacctcatgcgaggagttgctccacaggtgtggaggatgaaagaacaagttggggcgaccctgagagagcccagagacaagctctgcaggaagcaggcaccaccactgggccaggtgacctgagcccaggagccaagaggatgccctccactgctgatactacctctgcagtgggacgacatcggaccccactgccgatgctgggacggtgcttcccctccccctgaggctctcctaccagggccccctctcatcaggccccagctggaagccaactggaaagggagtcggggaagtttcatttgtgggggtccaagtgccaagggacagacaagggaagggtggatttgcagctaagaagatagtaaataaccagactacgtgacagtctgaagaatcaaatctggaatcaaattctactctgctctaatgtaaccctgtattttactgtgaataatataccgtgggtatcttccttgcttgatagatacagctccacataatttttctcaatgaaacagattctggagtaggcaacgttttcctcttttgtaaaatacaccaaattgtgaggattgaatgagataatgtcaaagtattagtactttaccctagctgattgacagtatccagtgatagtgataataagggtaattactactctagccaattttatcaaacctatggatgtttaaggaattgggttttttttttttctcctttgatgaatactcctgtaaatacatcgttgcctgcttgtctgagtctttctgtgggtttttagaagtggattacttgcagcaaagtctcctctacttaaggctctttgtatattttgcctaattgtgctctagaaatacatcaatttccagtcctccttctctcagaccacctgtccctcacattttcaccagttctgggtcttgttattctttttactctttgtcagtcaggtgattgaaaaatgtacatttttttaaaattggcatttattagtgagcttgaggatgtttttcacagtcatatggaaacagttctgcttcatgaacaagaccttggggccacatactggcttgttcacctggatgcattttctcagtctccctcagaatcatttttctccctgaaaaatgggattaaaagtattaatagtagtgcccatctcacagagtcattgcgaggattaaagagaggatgcatagacgtattgaatcagtgctgggttctggtagatgttcagctagccctagagattattagccatttgatgtgctgatcctcaggaaggtgggcgggagagacctagacgcagaaaaggagctctggagttgaggtttctagagatgaggtggtgcgtggtggcccagtccagcatggctctgggtgtgagcacaacataggcagatgtgtctggggctcagggagtcatttgtggattgagggtgctatgtgggtgtggaccacggtgatccaggatgatgcaggatttgggccggggaggaagatggcaacccaggttccatgccatctttaaagaggggatggttactagggtgtccagcgaccagccaagtggcctatagataataaggaggactcttcatgacatggaggctgaggtggaaagtcccagagtagggttcagccctggccctaaaaagtgccggagaacctgtagcctcctggaagctgtgctgtgtgcagagccaagcttcagtgtgacaaggaatggtgggagcaatttggagaagaatgaagacttggtgcagtggctagggaggcaggcagggtgaggatgtggaagggtgcagagctgctcaaggtcagcttcctgagcctgcggtgtggtcccttgctccacactcagaagggccctgtgtttgatttaatgctcttttcttgccatcttgaaattcttgatagtttttgaacaagggatccatgttttcattttgcgctgggcctggaaattacgttgctggtgctgaggggatgtgcagagcagaggtgggcagagaactgacgagaaggacacgtgggtaagggtgggatgagctggcctcaggactccgagcagagctcatgtaaaggtgtcgggcccaggatgcgttctcaggctggggtgggaggcctgatgatggcagatttctctggattacaaatagaatatgtagcagggtggttcatagctttgtgtgtctgtgtgtgcattggtaaatttttattttgaaactaaaattatttcaaaattagagaaaggctgtgagagtgcggttgagctggtgttggctctggaacagggtttcccaatgcaggcggcactggtaactatgtgccttgggtcattctttgttgtgggggctgtcctgtgccccatgggatgttccctgcacccctggcctctgccttctagatgctggggggcactttccctggtgtaatattaaaaaaaactctccacgttgccacatttggggggcagaatcaccccctccccgaattgagaagctatgttattggaacacagtgtcctgtattttgtctagcctctgctgcttagagctgcctgagcttggagaagatacttgttctctttccaaagcttcactgtccctttctgtacattgtcaggacggctgttaataccactgctctaaatgtgctcagttttgcataaacatcagctaatgttaaaattttaatctctgctaatataagaggcatcgaagtacacgcgagttcagtttgcatatggtgaggagggagacggcctcatatcgtatgtgtgtatttgccgattctatattttgaggttgattcctgttgtcttttgttcagttgtctcattctgttttcttttggggctttgaatgcccttttcatgcctgtgacctctctttactatgccttttcttctctgccagcaaatctcatccattcttccagggcaccttactgtcccccaaagccccagtgactgctctgtccacagggcttggtttctgtgctctggctctgcaatgcaatgcagaaggggctgggctcggaatggggttgctggtcaggccatgtgcccaggggaaggacacaggactcaaggagtccacccctctctcccccccttttttttttggtcactgaaatattttctttccaattctactagtcctgctagagctgccataacaaaatacccaattggtgacttcaacaacagaaattgattccacactgttcttttttttttttttctttttgagatggagtcttgctctgtctcccaggcaggaatgcagtggtgtgatcttggctcactgcaacctctgtttcccaggtttgagcagttctcctgcctcagcctcccgagtagctgggactacaggcacatgcactgtgtctggctactttttatattttttagtagagatggggtttcaccatgttggtcaggccggtctcgaactcctgacctcaagttatctgcctgcctcagcctcccaaagtgctgggattacagacgtgagccacttcgcctggccatgatcccgcacagttctgaaggccagaagccaagatcaggagaccagtggattgtttctcccgaggcctctgttcttggcttgcaggtggccccttgctgtgccctcacatggcctttgccctgcgtacatccgaagccccagtgtctctctgtgtgtccaaatttcctcttcttagaaggatgccggtcatattggattagggcccacccgtgtgacctcattttaccttaataacctctttcaagtttctgtctccaaatacagtcacattccaggggctagagcctcaacatggaagttttggagggagacacacttctacccataacaccaatgtcatattaagctttatggaagaatagaccaatatgtggtgggttcaagaatcttttcttagaagaaaagtgaatctgtatatttgatactttatgatttccttatttgctctaagcagttggtaagaatctcagtgtcacttggctgaatgatacactactggtgcctccagacctatgaggagcctaatatttttgtcttggttgaaacaatgcaaatcctgggttttggagatgctcacagccagctgtctgattacgtaaactgaaagtggcagagaggaagcttttgcgtggggaaaacatgaaatatacaagggttcctttaaaacagagtgtacttctgaacatttactgaaggtggagggccctggacacctgatgttatcttatgtggcgttatctgggtcagatttcattgcatttcctgaagaggtaacttggcagtcctgggagaggctggaccttggtgtccaggtggcaggttcataagacacctgtgatttgatgtgagccagtcacagaggaagccatttccagagaggaacaaccgtgtagactgctttcctgggagtcaagttaaaacttctctcctgtgaccttgtcacccggcagtggaaagttacccttggctgcagccacgacttccgcatactcttcagaacttgctctgcccttgagttttccagctttcctttaatgcactaaacctttaatattgtattctcctaaatgagacgtctcgcatttgagcaggtaacactcggtaagactttgcttggtgggggaggaggttttaccttcctgtggcattctgaagctctccacatccacccatagtcatgattgtgttatatgacctcaagatgctggagctgttaattcatctttaacataattgacctgattacttctttcttgaaggattttgttcaaacctcagggtttatttaggaacaagtctaaccaggcctgattggttttcctaagtggagatacagctttgggaaacaaattaagaaaatgaatggattgaaaatgtaggaacaccgtgacagttgtgaatttttcttattgagggaaaaaatgggtatctgtgaatatttctcttacactatatagtgagaaatgacactctgctgtggatggtaatttatttctgtgtaattgcctgagtaaggctttctctgatattgaatactgagtagaactcttaggttatttttggaagaattatggattttctcttaggttttagaatattttttgtttgcctgttaagagaatttgatgaagatttcaatgtaattaaccaaataaaatggcattctgtatcctgggaagggacgatgtctttcagttctaaatcaatgcatcatttacctcctatctctcttgctggccgagccatcaatcctgtttttattaaatgttgttgttattgttttgagacggagtttcactcttgttgcctaggctggagtgcaatggcataatctcggcccactgcaacctccgcctcctgggttcaagcaattctcctgcctcagcctcctgagtagctgggactacaggcatgcgccaccacacctgactaattttagtagttacagggtttctccatgttggtcaggctggtctcgagctcccgacctcaggtgatccgcctgccttggcctcccaaagtgctgggattacaggcgtgagccactgcacccggccgttttttgataaattttaaacttctggtttgaaacttttgtttcctgtgcttaaaaggagacagttaaaagcactctgatttggactgacagaatgttttttagatgttagatagatctagctttgaatatttatttgcagagaagtagcagggaggactaggaatgactttttcttaggaggtgctatgcattccatcaggtgactgacccctttgtgagctgtagtggtcagtcccagcatggcccacacttgttggctgtcttagccatggtggctgtggttggcgggtacccagccaagggttttccatactgggggccttggtccagtgggggcgggtcgtaccatgacccccttctcctgtgatcttgcctcactggcccaggtaaattggtggacgtccttgactcctccacctccaaaaggactttgaactttggcactgttgggagtttaggctacacctcaaccaggcagagattgggatctaacctacttttaaaagccctctacagggaatttcataactttcctgagtgttaggttttggtgattaacagccttgactttttggagcccttcctttgccaaacatgcattcctcaggtgctcacttaaaatgattcttcacaatatgcctatagacgggtctgtctggtacagcatcctggagtggtgtcaagggaaagaaacatgctgcttctgccacagacggaccatgcatgggaagaaactatttgagaatggctctccaaggggctggtcggccttgtctgcccactccctctacctttctttgttctgtttctttctcttcagtgttggtccattttccttttttcactgttgcgtgttagcacatcattactcttatctccatatatttggatgtttcctgcattatggtgagcttcagtaggtcttggatgagttagttgttctcattccaaaatgtaaatttctggtgtttagtaggtgctcagtaaagcttgagaaagatgaaagtgagagcccagaactagtataaaaatacggataccaccatagcatggtaattaaaggggtgattgtgaagatgaggtagctgtgcctggatatgtgtgtgtgtgtgtgtgtgtgtgtgtgtgtgtgtgtgtgttggctggagaaggcttaccagtggtgctggacatgtcgggtagagtgttaatagtaacttaattgactgaatttggaaataatctatggggttagagagcaaggaggtagctgtgtaagaggatggggtcggtgaggtggggtggtgtgagcaatggagctcaagggctcaaggtgcaggcctggactgatggccactaggaccaccccaatggcttcagggtcaggacaggaagggaatgtgattattgcagcaggtagtagggcagtatgagtgtattattcatatatgtgtgatgaaatggagcatcaaataatatatcccataggatagaaaggcacagtgagtgagtttgggttaaaaattcgatgagataaagtggttgtacctcctatgaaaacaatttaatttcttattatgaaggcattactcatgttcttcagaaaaattaaaaaaaaaaactcagtcattatagacaattgtactcaagatgaaaacaccctgtactgtcgcaaccctgaagcacctctgttaatatgtgtgtgtcttctcacggggtgattcttgatcagagttactgaaacagcaaggcttgggaacaagaggcatgagagcaacactcaggacctgttcagttttctgcacagttccaggtgctcttccagcattgctggctccgagagagtcaaatattcagagcttgcaagctggggaggaaaggggttagggtggagataaagatctgggagatctacagatacggatcatctgcatttggaaattttgtttgcccttctcacacatttccatccaagttttctttggggaagaggggatccctgcagaggagtccagttgcaaatgtgaaatcttaaaaatgtatgtaaatagcatctttcattccgtgatacttgtttgtttgaatagaacattgttaaattttattgtgcttcagaatcatctgggtgcttacaaacatagattgctggactctggttctggagattcggattctggaagtctgaagtggggcttgggaatctccatttcttccaagttgccaggtgatgctgatgctggtagtcgggagtccgtactttgagaaccactcttctacctaccaagacttccaaaaaattggtactctgggaagatgccctgtgccagtcctgtggcttcttaggcacgtcttccagcatagactcctgcagagaacctggtacctgcaagtacctagtacctgcaagtacctgcaagtccagtgtgggaaatctcatgacaggcatcaacattccgtgacggttgacagccacctatggggtggctgatgccttttctgtgtcttcagggttttaggggaaggagagtctaaatgagtggttctaggttgtgggaagagcctggctttgatgttcagacacctggcctcaggctgcatcgcccatacttcctgtggaatggttatcatgagtcctgttgtcctgtaggtgaatcattgattcctgtctttgcataacctctcacttgatgataatttttttttaaaaaaatgactcttggaaacagaacacacagtttgtagagggacctacagtacagcagaagctttgtggaaggatacaaaatgtgagggactgtagtcgaagagatttaaattggaagtgggaagagattgacttttttttttttttttttttttaaagacagagtcttgccctgtggtccaggctagagtgcagtggcacaatcttggctcactgcaacctccgcctcccaggttccagcggttctcctgcctcagcctcccgagtagctgggattacatgcatgagccaccaggcccagctaatttttctatttttagtagatatggggtttcaccatgttggccaggctggtctcgcaaactcctgacttcaggtgatctgctttgtgtctcttagggagcatgtttgaagagtcaaaggaaaaccaagtctgttagctttgcgaaacgtttttttttttgagatggagtctcgctctgtcccccaggctggagtgccgtggcgcaatctcggctcactgcaagctctgcctcgtgggttcacgctgttctcctgactcagcctcctgagtagctgggagtacaggcgcccgccaccacgcctggcaagtttttctggaatttttagtagagacggggtttcaccatgttagccaggatggtctctatctcctgaccttgtgatctgccctacttggcctccaaaatgctgggattacaggcgtgagtcaccgcacccggcccgaaatattgttaaaaccaagtacctttgtgaaacattgttacaaaaaccaagtaccaagtgtgtggcattaaagtcaaacattaatttcaagttacagaaagaaatagcactgagtagaggttgatcgataaaaaatgaataaaatattcaacagaaactccttaaaaataatgtgagaaatggacatgtgacatgggcgtttaaaaagtctgtaaggccaagaaaagtttcctgaaaggaacactgtgcccaggcagtcctggctttgcaggattccctgataaccgagctcaggcatcctgcagagtgagtactgcccagatagaaccttctgcctctttggggtaaaattcgatttcaaagagagagaactgtggggtgagaaaggaagactgggacccaaggggccaaactagtgacaatgactgctgtcatgaagggtgacaaggacaatacctgctgagctcaaaccaccctttggacccagtgaagctcagatgttgcttccagtgcaggagtagttaagctcaactgttttacaatatccagttatttggctgggtgtgatggctcacacccacactcctagcactttgggaggccaaggtgggtggattgcctgagctcaggagttcgagaccagcctgggcaacatggcaaaaccccatctctactaaaaatacaaaaaattagccagacgtgatggcaggcgcctgtaatcccagctacttgggaggctgaggcacgagaatcgcttgaacccagggaggcggaggttgtagtgatccaagatcatgccgttgcactccagcctgagtgacaagagtgagacttcgtctctaaataaataaataagtagcaaaaacaatccagttattcctcaaatatttatgagcacctcttaatgtttcagatactattgtgacaagagaaaaatgtgtttgtatatgtaaatagaaaaacaaaagtgatgtggaagcgattacttctgtcattttggaactaccttcctcccatattaagtccatattatgacaattcaaaaataatcaaacttcgtaagatattacctgtgaaaggaataagtatttaaaaatgtattttagatggccttttagaaatctagtccatggacacaatctagcatcatgcagttgccttcaaaaagaatatcctaaagttcttgtttgttttctttttcctttcaaagtgttctgttgaaaataacccatttgtcattttagttttgatatgacttagttatacatgccttttgaagcagtacccacccacatagtaattgcgactatcttgtgttttgaaaaaaaaaaaagcgagacaatttgactttgatagttttaagtttaaaaaaaaaaaaaaacgctccaagttagactcagatgaaatcctttgatcttaggtattttatgaggaaactggaaaaaataatttcacaaatttctattttgctttataaaaattttatgattcataacacagggaaaatccagtaagctaaggcgttttttagttgtttatcttgctagtgagtctttgatgtgagttatttctttgcagtaaggtggcatggatgggtgatgaggctaagctgaaaagttaaatctcataatggacatttgcaccctttaaggaagtaaagctctcaaagcatgattatggccaagatgaggccggtggcatgtttgtctcctaaatgtgcagccaggaatctcgacggtttgtctgaggtatgcaggtgcctggtagataaattagggtgagcatcattcatggcgtgtggtcagttgcaggccttcagccacagggatgacagaagggaagtgaggaatcagggatgggtttgaactgcggcgttgctttgggagtctctagacatgatcagttgcacatggactgttctccttgtcaccctcaggatctactgtcctgtggttgaagcctgcagctctcccaagttggtggcactgggcttcctgacttctcgatgtctaatgagacagtggaattctacttgcagccccactgcaggccaggtttatctctcctctgtcttcccagctggtgatttggtttctcagtgctgttttgggtgcacttttgtggaggattcaagctggtccttagccactccttgaaccagaacctcttttactttcttatgtagttcttctcttcctgtttttatatcctaaaactagtccagcgaccagcccatcgtagtagaagcgttggtgttcttcctaaaaggaattgtaaacatctcttggagagtgggttagccaccataaattgttttgggacttcggatacccccttccgcaaatgctatctagagatgctttaatttcatttcaattggttattgcatccctgatattttgaaactgttatgagtagaaaacattctggtttatgaacaatctgcttttcactatgaaatagatgggaattgtaattattcctgcgctttgtcttagagaagttacatgcatgcatcaagtgttgtgtgatcttgtgcagttcttcttagattgagtttttggctcctcgtgtgcaggccttctaaaatcacaatgtccctgagttgggaaggaacatcaggggctatctggttcattatcctaccccccaccgcctcccacgccccacatttctggcagcctacgagtctttggtccctccccagtgctacctggccagctctcagccttgggaggccacctgcccgtgtttgacctgggttaatgaccgccagttcctttcccttaatacaactcatctgctctcctgcatgctcgctccttgggtgagagctgccctctgcaacctcataacggaaaatggcttgacttctgccacctcctcctccttcccatgaaagaatctggtcttttctatctctctattatttttaaaaccagattaggttggttgtggtggctcacacctgtaaaaatcccagcaccttgggaggcagaggtgggcagatctcttgagccccaggagtttgagaccaacttgggcaacatggggaaatctctaccaaaaaaatacaggaaaaaaaaaaaaatagctgggtatggtagcacacacctgtagtcccagctacttgggaggctaaggtgggaggattgcttgagcctgggaggtcaaagctgcagtgagccttaatcactccagtgcactccagccggggcaacagctagaccttgtctcaaaaaaaaaaaaaaaaagaaaaataagaaaaagaaaccagattaaacattcctaagtaattctttttgtgacttttgcctgtttattaactatcctggctacttaaaatgaatttttgagttatgaatacatttagatggttttaaattcaaagaagtctcttttttctcagtcacttccatccccagccaaacagttcttatccccagagtcagccagtgttaccagtttcttgtgtccatgcagtttgctttatgcatttacgtaagcaaatattcgtacacacacacacaccctttctatcttatggaaagttatttcagtggcacatgtaagtatctcagcatctcttgattgtcattctttttggattttttttttaaatttcatacttacaaatgatcatgtatcttaagttttctgaagtagccttggtttcgcattttgactgtatttattatggtatcaggttccatatttcttaaaagtaatactgctgctgcacttacattgaacaagtcaccaagctctgttaattttgcctgaaaaatgccactgctttgacatgatagaaaacacaggcaatagtctttatttctcactgctgtttttttcttattttgaagaatcaccctaatacataggaaaatctcgacttagcaaagagataaatgagactgtaattattgcattgggtttttcacaatgtatgttagttatctattgctacataacaaattagttttagagttagcagcttataaagcaacagatatttattatctcacagtttctgtgggtcagtaaatcaaaagtggcttaactgggtggttctgacatgtgcctttccacagtgactggtatgtagcaggcaagggtctcttatgatcctgagtgaggatgtcagccaaggctgctgtcatctgaaggcttgactggaacagaaggacccatttctaaaatgagtcactcacatggctggaggcaagaggcctcagttccttatcgcagagattgctccttggggctgactgagtgtctgcacatcatagcaacagctggctttccccagagggaatgatccaaaagagaggtggaagcctaatgtctttgtgacctaatctccaaagtcacacactgtcacctcttccatattctattagaaaggagtcactaaatcagatacccatgggaaattacccacctcatgaagaaagaaatatcgagaatttgtggacctgtttcacaaccacacagcatcattttttgaaggtagagtcaccttgagcatttaaattagggttctgctctagaagtctatccctttattttttcccatttgttaaccctttttctacttggcataatagcagccattacccagtagaagttgagagatttaggttgcacagaatcccacagtcttttcagaaactcatatccttagggtgtctgcttgttgacagcattgtagaattgaaacttgaccacgtgttatgtgttgggctgccagtggtgatcagagatgacggtgagtagtccgttgagttagggctgtttgcctctgtcggtgtcatctgggtttgaactggacttgcagtcctggtgggctgctttcatttccaccctgggtctttgttctcaccactcacatcttacgcctctgttccaccgctgtgtaagaggcaactgtgcacacaccttgcctctgccattgactgtaagctcctgagagagagagagaatgtgtctggttcagttttgtggccctcctttttgctagcataatgcattgaacatagtatcattctgcatttttgttgagtgtataattagatggtcaatgtggagaactcagagggattttaggagggggtggcagcaatataaggttgtgggacccaacattaagagagggaaaggtgtagcgggaaggcgttggtgtggggagggagaaagtcaagaggattcaacctggcaagagttggaagtgacaggaaggtgtgtggggtggggacgcaataggacagtgtgtgagattttttaaaaaatgcaggcaggggagggatgagtaggcagagcaccgaggatttttaggacagtggaaatgctctgtatgatactataatgggggatacatgtcattatacatttgtccaaactcaaggagtgtacaacaccaagagtgagccctaaggtaaacgatgggcttcgggtgatttcgatgtgtgaattgtaacagggatactactctggagcaggatgttgatcatgggggaggctgtgagtgtgtcgcggtagggggtacgtaggaaatctccgtgccttctgctcaattttgctgtgaccctaaaactgctctaaaaagagtagtcttaaaaatgcatgaaataggatcctgtctcaggactggggcaagagcaggtagaaatggaaagagtgactgtggctgctgtgtagcaggcacacaatggtcatggtccatatgctggcttagttattttttaaagcaactaaagttaagtaatgtatacgtaacttacatatttatgtggtccaaaaaacgttggtcatctgttttaatgcagagagtgtttaccctaagcctgcaaatgtgatgggtaatagctagaactagaaaagtactttagaatatggaaggtaaatacatgaattaatttaggtaagagtgacaaaacagtggaagtccctgacttagaacttattgtccgcttggacagctggtgtacgtgatcctggggtcacagtggctccctgtgcaggaagaacactatttcccagctcagataccatctttttaggagagtacctgccattgtggaaaataaggataaaggataacaagttacctccttaagacaaagtcataggagaaatggtaaattccagtatcttgagttttgagttggaacttgaaatttattttactacaagaacactgttgatggattatgtattttatagactttgtgggtggctatgggactctagtaactgcttatgcacagtttatatgagtagggctgctggatttccagatgacgctctcgcaactgaaccttcagattaccacctgtttctcagtttggacactattagtgtgctgctgtcacttatggctcgggcaccttatcttgttttatgtcttgatgaagaagtacaaaattcagtgtaaaagaaaaacatatgtaaagcttatagaatcaccccgttacacaataacaatgcagaacaatagattaataacaggaagagatgctgaaacttctcttcagcctagtttctactctgatgtttcttctctgcattgtacagccaatctatgaataatattttcattgtctaagcaaagccaccttagctaaatatttaattctactggagtcataaacagggttcaaaatatcacacatagattttatgaaagtaataaaatgcttcagaaagtacagtggctcagcctggggccactgcatctgataatttggttacacaccttgtcatgtgcttcctaaaagaatgacgatggttgcttatctgtgtttaagcttgtcattttgaggaaacaaagataagacatttttgctgtgtctctaaaatgcatgtgtaaactatttttatagagtaatgcttcagagaggagtaaaatttcctgcaacaggtgcttgtaaacagtaattgctcagtaaaggtcacctcccagctgttgcctacatgttacataagagaaccccttcacgtcttccgtatttgcagctctgtacctttgtgagtcacctaaaaaataactcatagggttgtttttctttctttcttttttttttctttgagacagggtctcactctgtcgcccaggctggagtgcagtggtgcaatcccggctcactgcaacctccgcctcctgggttcaagcgattctcctgcctccattctcctgcctcagcctcctgagtagctgggactactggcatgcatcagcacgtccagctagttttatatttttagtagagacagggttttcaccatgttggtcaggctggtcttgaactcctgacctcaagtgatccacccatcttggcctcccaaagtgctgggattacaggcatgagccaccgtacccggcaggtttgtttttcttatgacaaaatcaagcctggatggtgtcgttaacggtgaagttaaaatttttcttttgctttccttaatatttccgtgtttttttctttttctttttttttttttttaacaaaagtctggtttctaaaccaaaatatttaatgcttcaaaaggaaaaaaatgtaagtcagtccaaagaaatgattcattttgcagaggtaattactactaacatcaacctttccaggtctttttctatgcagctatatcattgacatttttttaaaaatgagattacattgtactggagggtagactgctataacaacttttggttttggatgggaataaacagaaaaagtctcatctccagttcatttctggggagggtcaggaggtggggggtgcttggctctactcccttcgtatgattttcccttctttatctccaggatcttccccatttcacggagagacatggatgagaatgaaggctgctgagtgggaggggcttatggggccagttttgaagaggcctcataccttttggccacattccattggccagaactttgtcatatgactgcacctaactacaaggaagactgggaaatgtagtcaagttgcatgtccgggtagaaaagggacacttttctgtggaatagctagcatgtttgtaactcaattttataaaccattttgaaacttttcttaaaaaaagcttatttcagacacatttttatatgctggatctgctcacctctccatctctatcttattaaaagttcttgccagaatctctctccaattgttctccctccttctgccctgttccctcacagcagccacagtggttctttcaaagactgaagctacattttatcactcgcctgcttaaaactttacagtgcttctcccccagtggtcgggataatgttcaccctctcctgaagctggcctctgtggtccttgaccccatcaggtcccacggtgccctgcatggactctgccatccttcaccagcttccccccatcaaacggggcttgctgtcagctcttcctgcaactcccagccctgccgcaccactcagccttcttccttcaggcttcagctccagtgtcttttcgccaaagaagcctttcctgatctctcagccataaatgttcctctccccagttgctttttccctctccctctactcagttgctttatttaactgtcatattgtctttggagcacttgccaccatcagaaattatcttgcattatgtatttatagtctgtcttccgcctactagatggtgggttgcttgaggcaggaactctgtcttgtttacatctctatctccagataacgtgtctggcacgtgatgggtactcagtaaatacttgtggaataaagaaatgtcattacaggttctctatgcattaaaattttttagaaatggggtgttgcagccgggcgcagtggctcacgcctgtaatcccagcactttgggagactgaggctggtgtatcacctgaggtcaggagttcaagaccagcctgggcaacatggtgaaaccccatctctactaaaaattcaaaaattagctgggcatggtggcacacacctgtaatctcagctacttgggaggctgacgcagaagaatcacttgaacctgggaggcagaggttgcagtgagctgagatcccgccactgcactccaccttgggtgatagagtaagactctgtctcaaaaaaaagaaaaaaaaaaaagaaatggggtgttgctatgttgcccaggctagagtgcagtagctttccacaggcttgatcgtagcgcactgcagccttgagctcctggactcaagtgatcctcctgcttcagcacctccccgagtaagtggtactataggtacttcaggttttgaagcatgtgtaaaaaatactctagcagggacatcatttgagctgagcaggccatggaggcatcaaatgattagcagtagggtacaacttgttgtgagaaccagaaaagagccttggcctacataacatcctgtgctaaagaaagaaccctgactcccagcctgtgagtgttccagagatgggcagagcagtccctgcagcgcttcagggaacagggaagagcagctaacccctgatgcttctgtaagcactttgggacgccctttgctatagtagggtattgtcttagttatccctgacttgcctggtgttactttacatcccttaatcctttcatgaagactggcaaacacattcagtcctgccaaccttgaaagtaggccatgtttgaaagaacattggcacaaacgagttgcgaacatcttctttaccatattcatgttctttaccgtattatgaggacactgtgcttgccacatgggcagtcttgttttggggatacgtggttggatggacggttgggtggatggaagactcctggaatgtgaagtatctcaaggatgtgtgtccattgcatgaatgtatgtttgatctatgcagctaattgacaaagatccaccatcctgtaccctccatgttttatttttgccctgccattgttctcttcgacattctataatcatcaaggttttcttgccctcacctaggtcttgactaaacatgttgggtaaatgaatttcatattactactttcttgcgccgtcagccattgtgttcttggggactccatcctgagccttttttttttttttgagaccgagtctcaaaaacagtgaaggcaggtgactggtgaggagagttccagccactggattctccctcagtcccctgtgctgtggcccttggtgacccctagatttcagtgcccctgcctgacactggagtccctctgtaaagaagcccctttctagctagctagctgttccatcccgcacacccccacagaagccttttgctgccattagtaagcacgcctctattttctcacctgtgattgatcatgcatgattgagttttgtctattaaagcaattgataagttactaaaatggcaccaaaagaaattagaaaaaaattgttgcaaatgtcagtgaaatcttttaaaaaactgttgtactttagaagtgcctcaagtgactaatggaggcttaggactctgagtggtgtcacaaggaaccttatgcacagggacactgacattagcctgtactgtcacccaggctggagtgcagtggtgtgatcttggctcactgaaagccccacctcccaggttcagcaattctcctgcctcagcctcctgagtagctgggattataggcacatgccaccatgtctggctaaattttgtatttttagtagagacagggtttcaccatgttggccaggctggtctcgaactcctgtcctcgtgatccgcctgcctcggcctcccaaagtgctgggattacaggcataagccaccatgcctggcccctgggccattttttattcttactcttaggctaggtttctgcagaccttggttataactgcaggctctacattgataactgctgagtctctaagtcagaccagacgtttctccccatttagtgatacatgttttccatccaattgcttcatagacaccttggacacagtgctctatttcaatttatgttgacagttcatgacccaaactggaaacctgagttatcctggacttctgcctaccaccttctcctaagccatctcacctgtcctaaatgtcgtagcccttatctagttctctaagctgtcatagggtcctgtactgctgggctgcttgttgccttcaatagagcctggagcatattcatgtcggtatttcaaggccccgggcataagagcttcttaggaaatattggaatgaatgaagaaatgatgaataaatgaacaaatgaacagttgattgatttccaagacactttggggtggtttccatttagaatggtttttatttctttttactggaactaaggaattatttttgcttgttgatgccaacattttaaaagcactataattttgaaatgttttaccacattaaattcttttctattgcaggtcacatacaaatatgtcaacttcaaaggaggaattatttgttatatttatgcaaacttgtggcacttggacatttatctagatggttttttgtgtatgattgtgttcttggtacagctggaaaagctaactttaagtggcaggagtaattgatcttaatgacttactttgaattaaacttgtgcttaattaacttggatgttctaagtttctagagtcacagacttttagagctggaatattgctttttgaacttcagtgtaaggaagaattgcttatgcttgaattgatttgttctgtatcccaatactggactgagtagaaatcaattactttaatattggatgagagagtgattgattgaagatcaggtttttaacctctttttttgttctccttctcacagggagagtcccgtattctcagagtaaaagttgtttctggaattgatctcgccaaaaaggacatctttggagccaggtatgttggctttgtttttatttctgtggacttctgaaaaattgacaagcagttttcaaattcaggcacgcatcagaatcacctggaggacttcttaagacaaagctggctgggccccacctgcagggattctgatttaggaagtgatgctggcccagctggttccaggagcacattttgcacagggcttctggacttaccatcacaacagtagttaacagcctgttcttcacatgggctaatttcatgagattagcttctggtgttgtattctcagtagaaaaatacagtgtgggactatggctctgcttattttaatacttcaaaaatatttcaaacttagggaaacataaaagtgtcattttgtttctaggagaactggatattctggacatgtataatctgaattaagagatttggtgatttggggcgaatgtggtgatttctgtggcatttctagaagtaccagcagggaagcagccagatctttctgtgtgtttcagcttttttattttcagtattgcacttggatattcctgtatctttaaatcagcccttttgttcctattggctgtcagcaatgtgttgcatgaagttattggactgggagcagggtgagggtagccgtagagccacctggcactagaatttagccagattttggagaccaaagatcttttgaactttaaacctggaatggacatgagtgatgttctagtccaacttttccattttatggttgacaaagcttgaatccagaaaggttaaactacccgtgcaggtcacgtgggccagtgatgtttgaggagtgacaggaacactcctcctgcctctacccagtacattttcctttgtggcatggtggcctgaaaatactgtgaggtttaacaatgaaggcaggtgactggtgaggagagttccagccactggattctccctcagtcccctgtgctgtggcccttggtgacccctagatttcagtgcccctgcctgacactggagtccctctataaagaagcccctttctagctagctagctgttccatcccgcacacccccacagaagccttttgctgccattagtaagcacgcctctattttctcacctgtgattgatcatgcatgattgagttttgtctattaaagcaattgttaagttactaaaatggcaccaaaagaaattagaaaaaaattgttgcaaatgtcagtgaaatcttttaaaaaactgttgtacttagaagtgcctcaagtgactaatggaggcttaggactctgaatggtgtcacaaggaaccttatgcacagggacactgacatcagcctgtactgctggtaatgtcagagtgaagcaaatcccacctgaaggcactctcttgcttgaccgtgaagtcacactgagtggttcaccatgtgcctgcactcatgcaaggataagccaggtctctaggcatgggcagaaggatccctgcttcccttctcttccctttcagagcaacactttcagccatttccatgagtctgggctcttgttacccagctgaaatactgtttcctgaaactcacaaatttgctctctaccaaagcccaccttatgccctgcctttccatgaagcctgtcaagaaaattccaagaaagaaaatttgatattcctatatcaaagcgtgtgtctttcctctcctaatacctcttagctgccacagtaggtgcaatgtcattttagcttttgcagatgcattacctggtggtttcctagtatttctttcacttgcctcgattgctagattagaaatttactggggacagacatctttttaatatctttctcctactacttaacatatagagcatcaagggaaaaaaaaacaaaaattatcttttaaaaatgtaaacatttgcatgccaaccggtagtggattgtgcccttaggttaaaaatatgtattctcactctttccaatgaaatctgtagtgctgaaggagcaagttggatttagaaaattttggtgatttctttttaagcttgattgggtttttattttgttttatccaaaccctcccattaaaaaaaaaaattgattcacattgtatttctaagccagttaagtagatttaaggttgaatttgtagtggaattaggctccaaatcttagaagagcaaattcgtaccttgaatttttactgtttagataataacaggcagggtcatttctaagggacatggtggaaaggaatattcgtgatattaattagaaagataaatcgtattgtggccaagtggaccaagtgccagaaaatgcatcagaaactctgaatcctgcttctggtcttcattttcctagattgataagtaggcgcacacattcctgctttcctccctcctctgaagtgctgtagttcttcagggacacatttgccagtgggtctgagatgcaagtgtgaggtggcagtgtgggttaatgccatcttggtgtctcactctggagtggcactgcttattgccttaaaattttgccagatgacctgcattctccctccatgctatcttgggcaaatcccttaaaaccactcatgccactgtgtattagtgtacaacaaggataacagtttctttgtaactggcatgtggggaagaaccgcaaagtgacttctgtcggcagcagctctgtcgtgttttaaggtagtagtcaccgggcagaggtttggtagtgtcctctctggcagccaccgtctccttcagagccctgggccactgacatgccttttctccaagtctcttccctgagtattccccgcacctctgtgcctgatcagacacctcattctcccttggcagcaagaaggccgggtaggcattggagcccttgctgtagacaggataatgggtgaaagaggaagaacattttcatgagaggcatttcagagcctttaaagtggtagaaatcctgtagacaatgatgtttttaaaatcagggatttgcatctctgggactccaactcctttgtttccaagggaggttccctgggccacttggcctgaggttgggaaggggtcggtggttgcggggcagaatgtgatgcttggggatgcaggatggtcaggggcgggtgacggtgggaggagtggagcacgtcatctctccttgcccttccgaggtggtgatggaagctgcctacagctccagctcagaggccgggggtttctggggcccttggtgtggggcctctctcctagctggaggtggccccttcccccttgagaggcctgtgcctgaaatgcccttgtccttttcggccgtctcggccccagtccagtacttaggatccaagatcattttcagctccttccagccaagtctcactttattaaaggagctttgttcggagcagattggataaccgagccgcgactccacttgaacatctgagcagttggcccgcgtgggaaacagcaatggcagagaaagatgcttccctttggatcataccttgaggacaaaaaagggcagtcatataatctgtcatctaaactgggacgcttttgtctggaatgaatgcgacattgaatgggacgtccggacataagatgtaaattgagactgcagtcaccctaggtcagagacatccagcctttattatccatatcatggggaaaaaaaaatggaatgtgattttttttccccaaaacagcttaaaaaaaaatgctaagtaaaagaaaaaaataaaaagcaccttttaaaaaagcaggcctcacataaaatgccactaagacatcaaaagagaagtaaaaccctgctcaaaacgcccacgtggggcggccacagctcacccttgtgtgcctgtgtcccgtttctgctgtcccctttcccaaggacgtactctgccctaacctcaccctgatctggtgactcctccagtggcccatcctatgttcaccagctgggtcctcatctcctccgccacacaggctgctgctctgtcccccagcagacctctccctgtctctggggtgcccatgacccctgggaagtgctgtgcatagttctgtgagtgaggttgacttgttgttttatgcttagaattgtttctttctcctgaaattagatttttctcctctgatgactaggattctattttatttatttatttttattttccacgacctattatagcacatagcacctaacaggtcctcaggaagtatttaccaacagattgcatgaagtgagcccgttcttcctccctctctccttccctccctttcccaccccttcactggaaactcacagtcactaaatatgccatgaagttgctgccttttgcctttgcctgtgttttcccctctgcctggcatctgctcacatcctttctggcagctgccctctcatctgtcagggcccagtttgggtggcaacactcctgctgaggcccctgcccgcctcatcaccccagcccaagaggacagaacactgctgcccgcctcatcaccccagcccaagaggacagaacactgctgcccgcctcatcaccccagcccaagaggacagaacactgctgcccgcctcatcaccccagcccaagaggacagaacactgctgcccgcctcatcaccccagcccaaggggacaggacactgctgcccgcctcatcaccccagcccaaggggacaggacactgctgcccgcctcatcaccccagcccaagaggacagaacactgctgcccgcctcatcaccccagcccaagaggacagaacactgctgcccacctcatcaccccagcccaaggggacagaacactgctgctcctggggctgtagtgggtgtacaagttccctcctcctacggccccttgtcttagcggacttgggaggctcagaggctccagccctgtcttattggtgtttgcaggtccagaaatcttggcacatgacagttgcctggtaaactgccttgaattcattgagtggaacacaatatggtgtgctgtggcacctgatggccagcctggaggaaggggtacttttttctcattgtcatggaggtcccattggctcttcaagcatctctcccaagcatctaggagaggtgcttatttctcattctcacaaaggctctttgtggaccagcacaggaggcctgcctagggcttggatgaaaaatgagcatagagagaagaggttaagggaagcaagctcaagagtgggctcagagaaaagaatctgggggagtcaatgagatggcaggcaaggaacagtctccatttgatgctgatgtttgtgcagaatgactactttataccgtacagaaggagcacactctcttcttgtggtaggtcccagaaacttctacttgggggtacatgaggcccagctgggattgggcacagaaggtcatggctctgcacctgaccctcaccttaggggtcaggagagagccaaggacacgagtgatgggttagggaggactcaggcaccatggaatactgtggccatccttccatagaggagaggtacaggtggcaaggcaggcaccaggcagccgccgacagggtcaggaaccaaggcaggtccaggaaacagaggccaaaacagcagcaggaacctcaggcttagcagaccactgactcttctggaagtcttttagacgctctgtggtggggcagggacaagtccttggtgtttggccatggtgaagtgtgcagttagggtaggtgagtcgtgctttcttaacacgggggtaaggaaggagggtagagtttcagcagctcctgtttcttgagcacttgctatgtgccagatgtggtttgaactgtttacatgggagctcgttgggtcctcccagcaaagtcctatgtagcaggcactgttgttctttttgcagataaagaaactgaggcaagaaaggtttagtaagttgtagagctaggtattgaaccagggcctaacctcttaacagaagttagttagaggctgttacttgagtgctcacaggttggctggcaatgtgtttggaacccaatgtaatgtcattagattctgcctaaatcttgtgaagaggggatttccatttgataggtaagaaaattgagaagttatcatcagcccgagatcaaacaagggtatagggagtggtgggacctattaagttcagatttatgtgacttctgatgctatgctcagtgatagatctcttcttgaggataaaagtttgagaattagggttcctcgaaaaccctgagatttctttttttgaggggtacctttttgtgttagcagatttaaagagctggccattgtatttgatggtagctgagtaagccttttgaattggagtatcatcaactattactagatttagaataggtatattttgctaagtaagatcttaaagtttttcctttaaacttaggatagctgttcaaatttcaaactcttcttttttcagtaagctggagacatttaaccttttgtcataggcttaaagcagtcattaaacagggtcatttcaatgcaactttttaaacctaactcccctccctttttctctttaattatgatcagtggcttcatttgagcttacctaggatgcatttgagactataaagctgctttcttaaaacttagcaatgttggctgagacaaaccaactgtagaatctcatgctttcataaagaaggttgcaagacattcattcacagttgctcctttattgtgtgtgatgagccattggcatcaaacctgcttgggttgctatcagtttttcttttgagagctggtgacttgcaatttaaaacacacatgggctcaagggtattggagggacatggcagaaagtccttctgctgcctagtgattgagagtgatggggtcctaactctgtgtgaggatagctctttgacacagctcacctcagtcccctttacctaggtttaagttgttagcattttgctgtatttgctccatctctttttttccctgaagtattcagaagtgaattacagacatcatgacgtttagttcctaaatacttcagcccaaacctctaaaaaacaagaacatatttctatataactgtagtactgttctcacaaaattaagactaattgcctaatggactctattacctgatccattatctgaacttccccagctgaccttaaaatgccttttacagctggactgtttaaaccaggattcaattgagaattctgtattgcatttaatcggtgggtctattaagactctcttaacctagaatagtgataaaagctttttactcttggtctctttgcaaactggggacccccagccagcaacaccccacctgggtctcactctaccatgctggggtgccctagctcacctgtgttatagcttgtacctgtgttcagtggttcccgagttcttgcatggcacccaagaagaatgaggatatgctggacattgagggtgaggagggcagagtagaattttactgagcaatggaatagctctcggtggagaggggctgcagtcaggtgcttctctccttcccgtgtggctgggcccagggctttttatgggctcagaataggggaggggcaggctgcaggtagtattggaaaaggcaacatttgattcattaaaaggcattgttcagaaagaatcaatcaggaaagggtgggcagacaggaacagaagttctcgctctggttcgtgggtttcatccgggaccagcagtccagtctttcagccttcaggctgtttttggctcgaaggtggggtttcaccggggacccgcccctatctgcccaggcgtttggctgcttcctatcactatcaatagtccctccccttcaatgacttgtaggaaggttgtttcgcttaccacattccatcgtgtcctggtggcatcatcaatgaatgaacatgttcttttccccatgtttcttgtacgtactgtgtattagaagttggactaaaggcttgatcaaatttgaggcaggaatgggtgaggctacgtgcgactggagggacacaatgactggttctgtcataatcagtgattgaaattgatccctgggtaaatgtgggggcagtctcatccctccactatcaaaaattaacattttttttccccaggtgaccagcaagtaacgaggggaggggctgttttggtactgtatacctgcaaattttaaatattgatttactttacttccaaaggattggaaattttgtttttttctttctttgcccttctttgaaaacattgtacaaagtaaatctccttattttactaatggagaagcttctgaaagaggctgaacatacattgaagtacctttgctcagctgtaagcccttctggatcagaggtcagaccaaagtttgcagacagttggtccctgtggaccagactgaatccacacatgagtttatttggcctgtggagcactgaaacaaaaaaatgcaaatcctgagccaacgtttgggagatcccatattataatacaaatcgagatttccaggtttctggaaggtcttggcaatctagccacactgggcctgcatctgtgcaaggctgcatggctagaggtgtgtgctgggcacacccattaggtgggactgcgcctttctggccactagggaccgtacacctcctgttgttttcatgggggctggtttcccttgctgacacgtggccatgaggtccctcgaggtacaggccggcatttggacttgtcctctgcactgtttctttgttagcatttagaactgacttctcctcttcctcccccattgaggagcagcaccttactctgtgcagagtctgtctgtgatctgcaggctctttgcagagctacatttctctctggaggccttgctgagcagcctccgctgtctagggcattgctgagaatcacaacatcaacactaatggcccttgggccaaaaagtgtttgtcttaaaatccctgcaccaaatagcttgtgcaattactcctgtgagagccccagaggatctaactcttaggctgtttgttctagctgtattccttcccaccccccaaaccgaaatgacattaaaggatagtaactccctcccgcaaatatagataaaaacctctttactccctaacaaccacacaactatttacatttttgtgtttacctcctagtctttaagtatatgaatgcatgcaacgtcctttaaaaatatgtcaatcctagcctccacaccacccagccgaccaggtttcccagagggaagcattggaaatggcagatgggtaaatgcacagagctggcaaatctccatcctgcgggaggcttgctgtgcaatatagccatcgccacaataatggatcttcctaatgatccggaatcactgagcaaagactgtgccatgttcagtatacactaagtgagcatgcagggaatatatgatcagtttacaaacatttccacataagcttttttctctctcccactccagttttggtaaataaaagagcaaactagactgctttctttctctctctcactctccccctgtctccctccctcttcctctctgtccctgtccctctctcctgcctccctcattcactctgtcgtcctctctctctcctcctcctccttccttccttgcttcatttcccccctcatctctttcttcctcaccctttttaaaaagagacaggagtcttgctctgttgcacaggttagagtgcaggggtgcaatcatagctcactgtaacctcaaactcctgagctcaagcagtcctcctgcctcagcctccccagtagctgggagtacaggcacactaccatgcccagctaatttttaaaaatctttatagaggtgttgtcttgctgtgttgcccaggtgggtctcaaactcctgacctcaagtgaccctcccgccttggcctctcaaagtgctggaattacaggtgcaaaccactgtgtccagccagacaggtcacttttctgtaccattccctgatgttgtgagattagtgagagtccctactgtggaaccttgttcacgttgccctgactcctgatgcatggatatttgctgttaccaaagacacctctgctttaccaaatgttttgacagagtggaaggaaaactacaagacttcttgccctcgttttcttcagtctagaatgatgctggggtcactgagtctgtagggcagagaatctgatgtgttttttaggaagcggaaggtgtctgacacatagatgtttgacaaattttgttaatctggtcagagtgcagcctagaaaattaaattaaaaagctgctgaggagtgctggggtcgcattttgacatagatacaaaggcaccaatagggccaaaagtatgaggccagtcctagggctggtgaagtttggatcccctgcctgacattgtgtcctgagcccctggccccttcctgcacctctccctgagccgccggcccctcctcattccttcctctcctttatcttccgctgtctttgcctgtgcccccacgcccgtgccctgaatctggagtctttgtcttagtgcattctgtttgtctcactgtcttcctctgttttccttttcttgcggggaggaagggtagaaagagtgtaagaagctcaagtatgaggaagggaaggttgccaacttgagatgagtcagaaatgaaagcagttctgaatgtgtaagacaatgaggaaaatatttatttaacaaaaattgaactaccaaccaagccttcaggaacacagccagaaggtgctgtgtagggagaggtgtgcattaggatgctggagcgtggctgccggcgtccccaccccaggaggaagggactcgtttctctgaaccttgttaatggttctccccattgtagacaggactggctctccaccccatcctcagtgggtgcagctttggggaggccgtgaggctggtgatcttggggcctcctatgcatctgtgttattgaaggtaacaatgtcccttctacccaaaagtcatgcttttaaaaacgcacaatcttgaatccatttgggaaacatctttggaactccagaatgttgtctttctcagatatgtattgccaatgttgtattacttcatttgctaagaaacattgtcatcgactttataaaattattgaataattctatttgggggagaagcctggaagctaagattttaaaggttatttataagttaagtgaactggcaaattcttaaatggtaaataaaacctttcctacatgctataggtagttatctaaatcagggcctaacaagcttttttatttattttcctgtaaaaagccagatactaagtagttgaggctttgcaggactgatggtctctgacatagcactaaagcagccttgggcaatacataaacaaaggggcatgtgtgtgagctgatggtccacgggctgcagtctgccaacctctgatgttataagccattgattttctacaacatatatatttagaactgggagtgtcagtgttattttgtcatggtttccagattaaactctttcatattgctgctggtcggtcaatgacagactaattctgctagcattgactttctgggccagggaatggggttcctagatagtgcagtagctttttatttattttcttttccattcaagggtaacatgcttaaaatacagcgtatgaagcttttggatatccactgtaaattttaaggtctaaaaatgaatgcaattgtgaaatgtttttgccttagagaaaacgctctcactgctttgtgttataaatgcatgaaaaataatgatgaattaaatgcatacaaacagatgcagacataatttagatgagtgtattgcaattaaaatattgcccactttcgctacggaatattcgttggacttatgaccttagtgtaagtaatgtttaataaggaatctgcaatgtgtaactcctccgtaaattattaaaaggattggcattcctactgtataatatcaacacaagggatagaaaatatgcctggattcttaatgaatgtgtgctaacgttccttctggcataggaatgtgtagtaaatacacttcaagggttgttcgcatttttatccgtcattgttataggcatgttattgtgtgtctcctattgaagaactgattgatcattgttttaagcttctgtgacttttagatgcttaaaactaggcgttcatggtaggaaagtagagaaacatgtggaagaaatactgcgtttcaagtttgggagtggctggtagaaaaatcaaactaggctagtcttacagctttatcgcagttttgttttttttcctagtaggaaaatgatagtattggttgtatattaaaacactctctctgacactgacttgaatcacgtgcgagttcattgagaacagggattttaacttggttaggtgattttaaacattatttagcaaatctggaaaacaaaagagaaattttcaaatatctttcttccacggtggtgtactggctctctggagtgtgatttcatcttctcttattattgcatatgtagtcaagccatcatgttcttgaagtgagacttcaaccactagtggggccgtataattcaggatcttttgtttgtccttacatagtttcttggcctggaatgtcaaaatatcagaaactgttctttctctggaatcatctgtctccgtgatggcctcgccatctgtacagtcatccaagctagggaccaaagagtcgtcctttactctctcatccttccggctgctgtgtctggctttcagtgtttgtgtagagcaggggtctccaactcctgtggcgtgttaggaagtgggccgcacagcaggaggtgagccatgggtaggcgggcaaaacttcctctatttacagctgctccccatcattcgcattgctgcctgagctccgctgcctctcggatcagccaccagcattagattctcataggaccatgaaccctattgtggaactttgcatgtgagggatctaggttgcacactccttatgagaatctaacgcctgatgatccgtcactgtcccccatcacccctagatgggaccatctagttgcaggaaaacaagctcggggctcctactgattctatattatgaagagttgtataattatttcatcatctattacaatgtaataataatagaaataaagtgcaccataaatgtaatgcccttgaatcatctccaaaccatccaccccactcctccaacccccaaaccagcctggagaaaaattgtcttccacaaaaccagtccctggtgccaaaaaagttggggaccgttggtgtagaggactcctcaagcagcgtccatatctgccctattctctctattcctccacctaggtatagaattctatctctaagacacagacagaccatgttcctgcctgggcaaacacttcggtgactgtgcattgccctgggtgaacgggggcacagaggtctttgtgacgccctgcaacgcatccctctccgagccgcggtgcgctcttcctcctctgtgccttgccggtgcccagaaccacccccttctccctctttgcacaagtgccttgctctctcctttctcaggccagtgctgctgatctgtctgtgtgacccgggtgcacagtccttggctctgtgcctggccctgtgcaggtctctgtggtggcacttagcacatggcgctaagattctccctgataggccttcagcgccgcaagggccagcaccgagtcctgcacatcctgctctagtcccacatcggcccaggggcgttgagctgaggacggctccctaccccctttctgtgcttggccgactccagcgcccgttcttctgcccctccttggctctgcctccccaccccttggctgaatctctcctcctttcgtgcttgttctccaggtgacttattcaggtccatattttcattacccttgcatttcattaattttctcatttattttattctgtaggtttaggacattctttaaaacatgcaggttctgaattttaataatataaaagtcctctgtgagtgcccatcacattgcttttctgtcctccctacattaaagttagcactgatgcctttatgtttaaggaaagcctcctgcagaggggctctgcccatgtaagttcattagaaggcaggtgtacagcctctgtcacctgaagacctcttaactgtctattccttctctggtctatcgaggtgtattgggggggttacagcaccctctggtggccatattgtcaggtgcatttttgttctagccaaataaaatgataacacaaatcgaatagtcgattggagttctttttcagaggacatcgttaattcacattttgtgtgtttcagcaggtatttaagccattctcgaatagtgacacttatgcagaggagagaatgattttatttaagtaatttctactttttacatagctagttttaaagtagataatacatagtcttaaactttatttcccctttatttctttcttttctgttagagaatttcttaaacttgtagaattatccaaataaaatgccagtcactaaaaaggaataattaaccaatagtgggaaaaaattaaattcttcaaatgaagagtactgtattcatttcatatggtcccagagataaaatgtttaggattcatttttagttttaaatgtttatgaatcagagcttcaacactcttccaggtttctttaagaaaggaatttgtctatctacggattaattaattagcagagcctctctgtgtcaccaagactggagtgcagtggtgcggctgtagctcactacagccttgaactcttgggctcaggcaaccttcccacgttagactcccaaatagctagaccatggtgcatgcaaccatgcccagctaattttttttttcaatttttctgtagatacagggatctcgctatattgcccaggctggtcttgaactcctgaaggcctcaagcgatcctcctgtcgtggcctaagaaaggaattcctcatatagaaaaatattgttatataaatagttgcctatatccatgctgtttatggtaacagctaaggttcatctcaaaagtatttgtatttggctttggaataaaaagaaatttcccctttcatagggttctgagattgtaggagtttttagtatttcaaaaagttaatggaacaatctgtgatgtgaaagagactcagaagaggctagagaggtctttaacacattttttttttgtattgttatcccttccctatagctaactttgtagatgacattgtttttcagactgatgattgtgaccctcaaccatggcagcaacaatttttaatttaaattttttaaaatgcaaggttgggtgattttctctctggatgcttgagttttgtttttgataaaaattctaccaggggcaggggaaagagtccattaagtcttggtgcaagaaacctgggcagattgcctaagtggatatgcatagcaaagaactgaaaacagagtagggggtgctgaaaacacccacagaggaaaatgcggggcggggggtgaatgcatctgctcattttgtaataaagtccttcctttcctttaacatctcttaatgttacaaataccaacaaaaaccatgcatgtcttcagtgggacagaaaatgagggaggcatttagggagaaaaaagtgtcagttgagatgatgttaaaataaagtttattttctttgcagttgcagacattaagatttattctctgggctgttaggacagttcctgcagctctctgtggtgacctgagcattgatacctttttttttttttttttttttttgagatggaatcttcctctgtctcccaggctggagtgcagaggcgcaacctcagttcactgcaacctcagcctcccaggtagctgggactacaggcacctgccaccacacccagctaatttttgtatttttagtagagatggagtttcaccatgttgcccagagtggtctcaaactcctgtcctcaagtgatctacccaccttggcctcccaaagtgctgggattacaggcgtgagccactgcgcctggcctgtgccttggtttctcagatatttctgcccctgtagtgttctatgcactatgcagggaggtcctgactgctcagagcttaaattctgcattcctttattttaagtgtttggccaactgcagaggaaggtaccttgaaagatactccctcttctccctcactgctgggtcccctgtcataggagacctggcctgaggaggcttcttcctggtaacctgggttgtcactgggaccacatcttcccataagaataatgcttcaggttgtatgggagaagtgtctgacagcagtaacttcagcacaccctgagaatggcccttatggcagacacaccggacagcagtcactgaagaaatgagggttgccacatggaggttgctgggaggagggtgctaagtgaaggtgctgtataagctgcatgctttttacaagcagttgaagttctgctgtccagcccagagccactgggccaccctataaataagttcctccaaataaaccctgtgccttgtttgttagctctgggtctcttctttggcttcttcaacttggtgctgtccctgttgaagttaatacgggtttggcacaacacaggagtagacggttacctgtaccctgccagctgtccttgctacaaacatttgcccagagagtggcatttgtgccggttcttaaagtgtttcttgagctgcacattaataggccatgtcctctttcaacctgccctctggctaggtagaacaaacactcttcacctgggctctgagccagctgctcacctgcagcacccccctccttggagatagcttttcatgttgcatcttaccgagttgattgagtattcacttcgaagctccatgctgcacgcatgggcctgtaaatagctttttcgtgcacttgtgggtgtcatttcagatcgcttcatcggatttcagttacccaagtttttacttggttcaccgtaagtttgcaaaaaagactttttgttatcctgaacattgcaggtggaaacatgattaattttgaattatttttgtttaacttctaccctctttcctatttacagcctattttgtttattttaacttccgctgttaagacttctaaggccaggcatggtggctcacgcctgtaatcccagcactttgggaggccaaggcgggcggatcatgaggtcaggagatcaaggccatcctggctaacatggtgaaaccccgtctctactaaaaatagagaaaattagccaggcgtggtggcgggtgcctgtagtcccagctactcaggaggctgaggcaggagaatggcgagaacctgggaggtggaggttgcagtgacccgagatcgcgccccattacttaaaggaagtgggcttgtgttttgtggccttaaggatgtaatctgttggtaggagggaatgagggtgtcctggtaggggtgtctggctttagtgtcaccattcttttaggaattgccatgttgtggggtcacgtcttgtaggagaaacgttctgaagtcatgggattctctaccctcctctcctgctcttggtttccaccagcagcctgcttggtgtggttttgaaatggagcagagatggttttgatgagcctcactggaggtgctgctgagattaccgagaggccttgctgggcacctggagtcaatcatgccgggcactagcatccgtcatcttaggaggtagggattattatcctacctcctaagccatccctggagtggtggcttggagaagttttccagagaaaccgatcagttcataaagtttctgtaaaggattaacacagtgtagtccagaaatgtttgttcatgaagtcttggtttttgggtttaagaaagtgttctcctgtctgggcgtggtggctcacgcttgtaatcccagcactttgggaggctgaggtaggcggatcacgtggtcaggagatcgagaccatcctggctaacacggtgaaaccccgtctctactaaaaatacaaaaaattagctgggcatggcggcgggcgcctgtagtcccagctacttgggaggctgaagcaggagaatggcgtgaacgcaggaggtggagcttgcagggagccgagatggcaccactgcactccagcctgggcgacagagcgagactccatctcaaaaaaaaaaaagaaaagaaaagaaagtgttctcctaagtgctgctcaccctttttcccaaacaggacctaaccctgcgagggagggtgaattaggccatttgtttacagtttcatcagcaccaggcgtgcacggcgttagtcatggtccttgctctcaaggcactgtacttgtagcagcagtatggtgcaaatgtgcagctgaacagtggacacaggttcctggttagcatttagtgccacaggaatgacagggaggtcttaattgtgatcggaccgtgggagctggattaccccagactgtagctcacttccctgtaagcttttggtagggagcttggaattagcaccattagtagaaacagatttcaaagggaatggtacctgttccgtatgaaacactttaaaactcccggtgtccacacgtctttaaaaaagaggcttaaagcagtttcatttcatcaaccccaaactggagaagctatgaatgaccacactgatgaatatgtcctaaaatatatgtatattatataaagtgtaaaaacagacaagcaggaacatactaccagtttctatcacagctacccttaaactatcattggagggcaattaagtgggtacaacctctagctatttggaaatatgtataaaaatgacaaatgcctggttgggtgctgtggctcacgcctgtaatcccaacactttgggaggcctaggcgggtggatcacctgaggtcaggagttcgagaccagcctggccaacatagtgaaaccccatctctactaaaaatacaaaattagccgggtgtggtggtgcatgcctgtaatcccagctactcgggaggctgaggcaggagaaccgcttgaacccaggaggcagaggttgcagtgagccaagatcgcgccattgcactccaggctgggcaaaaagagcaaaactctgtctcaaaaaaaaaaaattaaaattaaaattaaaaagtaaaataaaatgatgaatgcctgtactcttagacccagcactcccagttctgccagttcatgcagcagatacatatgcacacgtacagagaaggatgcaacagatacatatgcacacgcatacagagaaggatacgtatgcacacgcgcacagagaaggatacatatgcacacgcacacagagaaggatacgtatgcacacgggaacagagaaggatgcacaagaacatacattccctagttgacggagtcgcagattagaaacaacagaaaagcgtccattaaacaacagtttgaacctgtgttgagatatcagcatcccttctccttctctcccccactccctctgccctctgcaggttttattctcagcctgattttctccattggatgtcagccctaggctggcatttgcagagagagatggtggctcctgcagagcttacggcctgtattttattgggctgtgttgagttacccctgatgtgagcaggagaatgggatgttctgtaaattggcctctagcccatcgtgaattcatattttttttataatgtgtgagtcacactcccttctgtcttcatttccttttcacactcccagcagatcattctctctattctgattggcattttatacatgaggcagcagaggctgagacctactgtattttgagacactgtagctttatatggcataattaaatcatagtcatcaatcactcttaggaggtaaggattattattggcattttccagatgagaaaaatggaggatgagaaaggttaggcatcttgctgaagtcacagcagacttaagtgccggagttggagctgcattccggtatgcttgcatagactctcttctcatgctcactgcacgccagtcacctggtatgctgaggccctgcctccaggccttctgattcagctggtctgcagccctggcatttccagctcctcaggtgattggaatgaaagccagagctgggagccactggtctacaccaccagtaaatgatcgggttctcacttgatcatttaattaagaatcttggttttctgctttcagtctgagaactcttgttcatgctctcaggcatgtcttcacgcaggaaagtgatctttgaaattaataggtgcttggaaagcctttaagcagcaggcagtggagaaggccactcagtaggaagggccgagcatgaagcctagtgcacaggcttttcaagaccccacggagggtcttcagaaaaatgggtttcctttgtctccgtggcttccagtctttgttggccagcagttgtctgcttcaaatgagctggctctagaggggcctggagaacccagaaaaactttgtgacaacctgacaagtttgtgttaatcttctgggcattggctttctgcacttattgctcactgaatcactgaaccaggcaggtggggtactggagggcaggggatgggtaagaagggcagcctttggaaggaaaatcagcagagggcagggaccggggaagaaggagtaagaagggaaacccttttcttaggttcttataaatcagaagagcaataaagaaaaaatttaaatctaaaaaatacatgattaggatttaaatccagtatgcttcactacatataaacctttgacttaatattttctgtagtagatgaaaataggactttttttgtttcccttctcttcacatggtattgagtttttttgtgttctgaatacgtgttaagattaattatgaaaatcaaattaccagatacttgaaatataaaattagtaatattcaaagacgattaaatgcacgatttccttttctcataaaaaaagaagcagacggaacttgtattctgaaagcaaatatggaaatcacattaaaaatcagaaaatcctcaccaccgccccccacccccatgtgcatttcatttctctttggtctgagttcaagggagagagaatatgaatgtgctgctagctcaggaagcttcagttctaactttctaaagagctgggaatgtgcttgagtctctgttatctcttgtttgcatttttcgctactttgcctccatttgatccagggaaaacttcatggtagggatgtgagatgtattttgagggctaaaagaaaggagtttgaacaaaagcaggacagtgttccgaatgtggaagcaaagagtccttccaaggggatgtgcggccaacgcctctgttcagcgatagtccagctgagaccaggacctgtgcctgatgcccaggccaccccacaggacggtcctccagcacctcatttctcctttcatcagacacctcttcactggcctactgggagaaaacggagatgagtgaaaatgtgcatacagaacatagggctcaaagggaccctagcaccagtggtgctcaagcctgtcccagcattagcgtcacctgggagctccaaaaacatattgttgccaagactcagtccaaagcaagtgacttccttggcctggagtgagatgtgggtggccagggtcaggaaccaccgagtgggtccacctctgcagactgggaaacagagtctgggaggctgcttgttccctcaaggacctgaagtgacatggggaggcaggactagccttggggctcctaattctgtcctggcctgtattccagtgtgccgtggggcacgtccaatttgaatctggccccagtacactctcaagccctgtgttgctctggtcccacagcttctgcccttgactttccatataacagcacattggtggccagggctttgcactaacctacctgcctccaacattgtttttgaataatggaagctaagcagatgcatattaatgcctgcattatggagaagactgtctcttcacaagtaatctgtagttgttagtcttgaaagtgggttaattcattgtctttctagagaaaatgattgcatggcctaatagtcttccagttagtctgtgtggcaaggtagaagccaggagtggattcttagctcctgttgagtgctgctgtcctgaatcagagatcttctctcccgggccactttgtcatgagcaggattttgaaccaagaccttttcttcacctgtctcgggggccctcaccgtgggctttgtgatcccctgacagctccaaaagcctttatcctcatccaatatctggtgaacagctgacacctcctgggaatctttaaaattgttctctaaagaaaccattctgctgcaagtacctatttttagactttataaagcccacgtcaggttgtcgctgcctttctctctgtctgctaagcctgctgtttgaaaggcagcaacaggatcttttgtctttaaaagttcagccccagctggtgcattccccacttgaactccatagccctggtgtgctctggggtacgtctcttccaaaacccaaaccacaggcagtgacctttacaccccaggagttgaaataatacacctggaggaagaaaataacttacaaacaatgagcctagagtataaatggctatgttttaaaaccctcgattttccttgggcgtatttaacctgtacagctagactgttgtgagttttgggctctctagggggctgtccaagttcagaacaagtgcatctgctggcagccagcttaaggagttagcagccctcaattccaataacgaacgtgtaaatcagaattcaggtgtgttgaagtggggccttgcacacatcctggtcagcccagggtgatttcctctctggccagtggttttgggttttttcttcacatgaactcgtctgttgtaactaatggtcactgagtgacttcagaggtagtgatagctcatagtgaagcccgtgacccacagcggtgggcacacctcgatcccttctccttttcctccatccccacctttctctccttacttcatcccttcctctttccacattgggtcatccagcagaagtcaagtatcttctatttcatatctttattgaataagagttttacgatccatgttattgaagtaggtaaatggaatctcttatgtggaattctctaaaaaagaatcaaaactccagtcaaaccaaaccaagtattccaaatcgtttttagggaaaaaagatataattagaaaagactggagagggtatgcaaactattaacattatgttagggtggtaggagtataagttatatttgctttttctgaatttctaaattttcttcaattaacatattgttcaaagtatcaaatacatagaaggaagagtgtgcatgcctgttatctagcaaacacacttcatgcaaagaaactctcctaaggaagtatgaagttatattttatccttatctatccaaagagagtgtgtgtgtgtcatatacctaaagaattagttattaagatgaagcattgcttataatgaaaaagttgaagcaccctaaattagcttaataatggtatatctttataatggaatagtataaagccattagaaatgatgttacagataagtatttaatgttatggaaacattttataacatagaatgaaaagtaaattgtagattggtttgtataatttgatctcatcttaggaaacacataatacagaaatatagatgaaggtctgaagggtattaatgccctaatgtattagtagcattacctcagagaagcaggctcatgagtgtttattttcttttcttctaactaagtatgtatatgtgtaagtgtgtctgtatacaggagatgtacatacacttttcttgtgaagaatctgtattgcatttactactggaagggtttattttagatttagatattaaagttacctctttgagtgagaacctatgatttatacttcttagcttaccttttacctccattatttaaatctgtctttttctgccatcaaatagaagatgtaacagtgataaaaaggctgggtatggtggcttacacctaaaatcccagcactttaggaggccaggggttcgagaccatcctgaacatagcgagtgacgtagtgagaccccatacctacagatttttaaaaggttagccagacgtggtggtgtgtgcctgtagccccagctactcaggaagctgaggtgggaggattgcttgagcccaggaggtcaaggctgcagtgagtcatgaatacaccactgcccttcattcagcctgggtggcagagtgagactctgtctctaaaagtataatattttaagaaagaaaaaacaaaaactagtgataaaaagaacttacaacaaactgatttttaagtggactgttgataattataagggctgagatttttaattgccatttgtatcaatgaataacccccctgtcaccacattttctggtgtgtttggtgtgtctggttcctataggagagacagtaatgctatttgacatgctttattgctgattagaagcctaatctctgtaatgggaagctcagtaatgaagcttgttcagaattgtgttacagtcggttaatgaagctctgagatcaagggcctggcttttgatggcccctatttcagaatccagaggtttgtttctatttatttgggttttgcaggtaagttccctggactgaggtgatctgaaggttagctctgctataataggtaaattgctaagaaaaacattggccttggtatgtacaacttaaaattttattggtgagatagtcttcttacaaaacaatcacgttaagctagaacttggtgtataaccagcatatatactcctgccaccctcagtgtgtagccaaagttctaaattgcatgcacagataacaggcatataattggtgatttcagaaaagttatacctggtgggcagtgagaggcgagccctgatctgggaaaccccagtgcttcaaggggaagcaatctgggaaactccaatgctgggattgggattcaatctgggaaaccccattgctgacaaggtacatggtacaagcttgataaaaacttgcttaatgtcacacttgtaatcccaacactttgggaggctgaggcagctggattacttgagttcaggagtttgagaccagtctgggtaacacggtgaaactccatctctacaaaaaatacaaaaattagcctggtgtggtggcatgcacctgtagtcccagctgctcgggaggctgaggtgggagaatagcttgaatacaagagttggaggttgcagtgagctgagattgcaccattgcactccagcctgagctacagaaaataataataatttaaaaaaacttaatgatgatagcatttgagttggcttttcaatcctggtttcctaaatatgtgagcctggaccattaaactgtgtgacaaggagctgtcatcttaacatacagacattaaatgcattgttcaagatcagaaatgatttcttggttctgaggcactattgactgtgtgtaaggtgccatcgttaatttggtaacaaggggagacagtggcagggaagttccttttgcctgtcttgtgataggcttcctattttctcaaaggttaagatattaaattgtcttaagcaaagaaggtatttaagggcatcatcagggttagttctcaggtctcctgactcctagcttctctagtttagtgattcacgttagcctttcaacagtttaccactcactttaatggtttttcctagctgtcttgacatgcttttcactgcttacatggttagtttcctacctagctgaatgcaggcatctgtgctgtctgctgggttcgctggtggtgatgcagcccacaggtacctgtctctttgaggggagttcagcaaccatctatttatgtcgaaaggcactgtactgggagatgaagaacacggagttctaggcctccaggaatttatcatcacttgctaatttgagctgagcctggcacttgaacataggccatagatttccagatgtgaaaaaaagaaagaaagaaagaaaaggatcctttaatgtatagacttgtctttctgcctgctttcttcacttctgatcattttaaacaattgatatcctagtttgatgtgatcatgttccaacacagcacaacagcatgtatggtttggggcatgcacctgtggcagttgcaaaggtttttacagtgaagtggctaagaggagagtaagaccagtgtatagggtgtggatgaggtcagatgcgagactatttcttgatttgagtcattttatttaggagctatttctttggaatactttatatatgagaatgtacatctgattggaagacagaaggtactgaaatttacctcttgatcaaattattctggtataaaattaaactaaataccaatcatatacttaatttcacagacttgcaaataatatactggggtaatggaagtaagagacaggaccttttatgtggtatgaagttctgtgataattcctatcttcctttgtacctaaaagaggcaccctctcctgtcatactgcaaacagatgccactactacgtgtagacacatttgccagctgtggcacagctggtcacccagccctcatcacagctgcctgtaaaacccagatttattctcttccccctgatcttttttagaaattactggtatcgttttagagagtatccaacttacacacaccacttaaataatgaattttccaatttcttctttttccacggccttcacgtcatctggtaaatattcccctcaggttggcatctgcttctgagaccctgctggacctagatatattcaccagagatgggtgaaggctttggaagagtgaagtggttaggaacatttcttccgatatctcctgctcattgtttttgacctctctgatttccagtatattctctgctccagccacacagctttcctgaacagctaagtcttgctcaccggtcagggaccagctcaaaggctgtccctttttaaatttatttcctgggtcttctcctggcctcttccctgcactcggtggagatgcctgccccatggttttcagtagcgttggctcttagctgttccgttctggggaaggattggttgttttccttttctccatgtgtgttgtgaatttcattctgtgtcaccgcatcacgcgaggtgggtagggaagagaacttttacgctccccgctgtcgttagtggcctgattacgagtctgtgggaaagaatgaaggttggaaagaagatctggtgggaaagaacaagggttgtccttgagcagccaaactaagctgtgagaatgttaatgtaataaagcaggaattctaatgggctgcctgctacagaggagatgggagatggtgtagggctcatgactgtaaaagcaggagccaccagcagatggtgatgcggcctcttggcccaggtgggactctgcatctccccctcccatggacattcacttgataagtgttgggccggtcacccatgccctggtcgttcttatcttatcgaagagtgctaatataagtaagctgtaaattcccattgtaagaaataattgccttttaaaagggagcattcaagaaaaagaccttttggctcaataaagcctttattttcctcaacactcttggctcttaaaaggggcctgttcttggccttgaagtgggaatttacacagaactttaaacagaagaaaccccctctgccttgggctgcaacttgttgtccctggcagggtttgggctgtggggtcatgggatctgtttgtttgaccgttgtatgcaaaaatgattttaaaattggcctccctaatctgttggagacattagttaaaaaaaaaatgagagtaaagaggaaaatattttgctattgggtatgcactggatccatttttaaactgagagaaggtgaaaggggtgactggttgatttcggataatacttttagagccacggggaactgtgaaagacaagaaaatgtaaaaaaagcacattgattgcaggaccggtggtccaaaagcagcacgtgaaagaggtttcaaggctgtttctacaaacaagaatgccaaaggtggcataggacaagaagcttgctggatgtcacgaagctagtggagatgggatccaaagctagttttggctgatgaaaatacaggctcatgccctgtatgtgaggacagtgggacagtaatttaaacagaagtatctagaggagtttccttattgccttgaatgtatttctttttaacattgctatggacatttaggaaaagatgccactgatattccaaaaggggcattccatacacctgagagggatccctgaggctccagggtcacctgggccaagccaggtatacacacgtctcatggcaagttggctgttatcataacttccctggtgttgttttgttgcaagggcagcattgtggggctgtggtttgaattgcttttttgtgtctcttgaatacacgaagttcctcctatagtcattggctctgctgcctctgatgaggcacttccgtgttccccacatttgaatttgctcccgattcgagagaggcaggcatccgcggcagcagcttccaacccagacaggcttaagccgcgcgagggtgcccgggtgggtggctgcgcagggccctacctgggcgggagcggctgcagagccctgtccacgcggtgcctccccagcacggcacctcccactccaggctgttggttacctggccgggagctggcggagaccaggatttctcctcgccgccgttgctgttgttaggggaaacagaccatctgcatctagacctgcctctctctccgctccccacttcagacgagctcttcctgcctggaatctggtaagtgccaccgaaggttccgttccctttattactcgattagtgcccacagcatcaggagaaggttctcttaccgtgaatccattagctttaacccaaatgtgcaggattagggggattatttgaacttgcttgctttctttttaaaatgtccattagacattttttgcatgcttcaaaatcaaaaggcggcacagtgaaaacattttaattatttatgtatttaacctgtatcatcttgtttctaacctcttttcttcagggtggtgcagtcaaaaattacacagatattgctctggtgcctctccccccttttatgaataaattactgcatttgtcatcactgtgttcctgaaatgtcaaaaatagacactgtaaaggaatctgtcatgcagagttcagaaattttcaaatttctgagttcaaaacctcaggtgaagcgaggacagatcttttatttaaaatttgattctttgtaggcttcactgtgaaataagttcaatttagagcatagctaatgcaatcagccagctcgtgatgggacaacatacttctctattgttttacattcacctcctgggatacacacactttctcatttgttttataacctttacaggaaatacctggggatgagtcacatgacccctaacttgagtttttacatgtattcacccagattaaatgattttgctcttatatggataaacgtgcagttaggaactttaaaaaattgtaaatgaggtgcataatcattactcattgtcttttactgcattcttcagccctcaaacatacaaactgttattccctttaagagaaaataaaactggcacttatgttttcctttactctaagttaaagactacccatgttatgtgccattaaaaaagatgtagaaattaatctgtctttttctttgacctaatcttactagcagggatattggggctctacttttctgttctctctctctctttttttttttttttttttttttttttaacatcagccacaggtaatactctccggtaaacatataacttgaggaaaattgaattaggttaatgctggaatagaaaaccagggcagtgcctgctctttttggataattctgtataaacaatgagaaagtctcaggctgccttagacaaaggctgagacgggagctcctgatgatttttatgagggggaagaggagatggtgaggaggagggcaccgagcatgtgcagcaacttgaagcatgtcagaaagaacatttgccagaaatcttcaaaaccgtggcggtcggtaatgtgtgaaattgaacttctgaccctgtttgcttgatggcgacttctcgttgtgcttgagaattgtgtggcattgggtccctggatgtgggaggaacagcaaagtggtttagtgaatagagagggaagtgccttcctttttgggtgggacttgccatgatagagcctgggccgtcaccttaaaaggagatgtttctgttgagagatggaaaattggcaagacaaacgccataaaccttaacctgtttataattccttacctgtaagctgctttgcacgcaaggtgatggttctacctcataagggacaaggaagaacagcacataaacctgactgaatggagtgtggctgtgggtgggagcagctttacaagaaggaaacggggccccctcctgagacacccccgtttgcttctgctccttccttgccattgacgtgcccttctcctgaaactacccacacctgtgtttggcaacaagcggctgccccttgatccagatgcatttttcaacttgcgaactctcacctcttgccaagggacccaagtacctggttaatgatctttaatgtaaatgatcctttgccttgattaacattgagctgggttagtatgcacaggccgagctccgtggtcctcccatgtgatcccttccctgccagccacctgcccacctgtaggaactgggcatggccagttttctctttatgtgctctctttgccttggatggaatttgggctgagaccgatgaggtggaaccaaagctgttcagcagaagagagcaaccacagagcagcctgttgggtggagggcttgagggttcctaaaatccgaggactttctggtgagcctctcccctgagcctgcttgagggaaggcgctgccccacacactctccagtgggtgggggtgggggtggcagcggctgatcaaaggttctcacctgcaagtgataatagcctgggtctctttggcaccaacctgccttcttcacctttctgctcagacaccccttggcacccctacataaaggaaagagctgtctggatggcctagtaactgtaggataggtaaagttagccctttcttctgacctagatatgtgatggtggtatttctacatgtttatgtcgagaactttacaaagatgaaagaaaagctttcagagctgcagaaatgagaggtggcccttttttaaaatttattttaagaaacaacttttaaaaccactttttgaaaaattggatggcaccgtcctgcagcctatcagatttcccttgagaactggggattattggcttattccttgctacctccaatcccaaattaagcagagtgacatgtaagaagctgggtacatcagcctaaagcgtttatcaggtatgtccttcccaactggatcttttctactccctggcccgaattttgttttagggaatggggcctattttaattgctggtggcaaaaggatccctgggcagtgtttccatggtcctctaaggtggagtgtcggggagctgggggacacacagtggtcatgggttatctgtcttggcctctttcccagaccaagttctgtctcatgcttattggtttggctgctagttatagaatctgatgtttaccttagaatcctaggatggaaagggttaagaatgatttctaatttgaattccttgtttctagggagttattaaacctatacattacatttattattttacaaagcactaattcataatagttgacaggaacaactattttttggcttctttgtttttttgtttgtttgtttgagatggagtttcactctgtcacccaggtctggagtgcagtggcgcaatctccgctcacagcaacctctacctcccaggttcaagcaattctcctgcctcagcctcccaagtagctgggattacaggtgctagctaatgtttgtatttttagtagagacggggttttgccatgttggccaggctggtctcgaactcctgacctcaggtgatccgcctgcctcggtctcccaaagtgctgggattacaggcatgagccaccacgtccggccttctttggttttcatattgattatattttctaagacaaatactcatttatatagtctaataaaaattgttaaatctaattaaacaactaataaaaatagttgtttaatccacgttgacatcttcttacattgcgatagaaattttgatatatttatccatatgatgaattgcttaaagccggtggttctcaaccagtggcagttttgccttctctcccacaagggacatttgacactatctggggacatttttcattgtcatattcaagggagtggggtgtgaagctggcaagcatctagtgtgtagaggcctgggtgctgctccactttctacattgcacaggatggcacctgacacacagcctaaagcgtcggtactggttgaccgtatacgaaatgctgtggaagaccaggcacggtggctcacgcttgtaatcccggcactttaggaggctggggcatgaggattgcttgagcccagcagtttgagaccatgtttaagtttaagttcatttaagttctctgaagtggtgattctgatgctatatagatgaaggttggtttgttgaagagctgactctggtatttcatccaacatctgcatttttctttagctaaggatgccttgagaaacattctagtctcttaggcctgaatttgttattagcttaatagctttcctctggttgaatttaaatggaaagaaaattgcatcttgcaacaggaaaaagaacattagggaaaaactgaggaaatggaaataaagtgtggaattttgttaataataaatcaaccttgatgcattaattgtgagacatgtcctgaaccaatgtagatcttaataataggggaaactggcttcagggtacgtggggactctatcttatctttataataattctctaagtctgaaacaaaaaagtttattaaaaaagcacaaacaaaattgctgccattttgttaacagatatagtagtcaatcttactgttttctttttctttgaaataggctgctgcaaaggtatgttctttgttatctcggctctctgctcagggtagccatgaaatggctcttttaaaaatgtgcccagataattttgaaccatttcaaaccatattatgtgattttaatttattttccattgcattcactaactcatttctgggtgatgtatttaaaagactagacagaatttacaggtttaaaaagttacattaacagaaaatgtaggtgccagttgaaatactgtcaactggaagtgctaccagcaatgtgctagctggacaatgggacttgtcccatttttttgctgggtgacagctatcactgcctcagggaggctggtgccatttaatgcctctgataatcagaataagtaattgtggcttctgggtctgtaaagccacaaaatacatatgcaggcctattttaattgacggtaagtcatgaaatacactattttcgtattaagataacgtggatatgttatggaacaaagttaaaaattagcatgaatttttaaagtactactggagattgttggctttaggttcgtgaaccccattcctgcccccacactcctgttagtggggctaccagaggggccagtatgaaaagcactggacttacagatgaaagaacttgagctggaatcaattcgagtcacttaccttcgctacaggtgggcagaggagtcatcctgcaattttgttgtgaaaacagaatgagataatataaaatgtatttgaatacagtgaggtctgtacagatgctgaatctattactttgcagtaggagtcaggtgtggccccacttccccaccttcttacctacttgtatcttagatcttatatatattgatattcacttttggtggactaaggttgtctttgttgcaaacctggactctcttgtattcttgctcagtgtgtgtatgttaatgttagataaagaagattaggctggtgcattggctcacgcctgtaatcccagcactttgggaggccaaggcgggcagatcacttgaggtcaggagttcgaggccaccctggccaacgtggtgaaaccccatctctactaaaaatacaaaaattagccaggcatggtggtgcctgcctgtaatcccagctacttgggaagctgaggcaggagaattgcttgaacccaggaagcagaggttgcagtgagccgagatcacgccactgtactccagcttgggtgacagagtgtgatcctgtctcaaaaaaaaaaagcagaagattatttggaaagctatttttaaattattcttcaaacatatactaaaatagagaagacaacatgagagccaacagcataatgaaaccccatcactcagcctcaaccgttgttaacagtttactatctttattgctactgaaggcagttaaatatttcttggcagtccttttttatttagcatataccatcagggatgacaatagaaacaggtttcaaagtcaggtgaaataatgtttctctatatgagttcaccactaacttgatacacagtttatgtttatgtttatgttcttattacgttcgtgtattaaggcaacctttcatccctgccccctaataggtaactgtctttatttgttctgggattatccctcctccattgccctttttggaaagagtatggatatatttgtattttctcttactcataaagcagcacatggtacatactgttctgagccctggttttctttttttcacttagcgttgtatactggaactcactcaatgtcagtatacagagaattcccttgtctttttataactctgtgctatacgctgacggaagttcattcagtcagtcccctattgatggacacttgagttattctcagacttgtccattgttttgcaaaaatagccctgggcatatgtcatttggtatttttgtcgaggcattccaataaaaataagtaaattcttcctctcttgccttgaagatgtgcagctcctcagtaaccttttattctctaaagctctgtcctcatctttaatccctgatttaagaggtgcagctcttcaggccataaacctttcttcctgcctcaagtttttaaagctacaaaggaacctaagagatcccttgtgttttacagctaaaggacctgagagcaggaaacaaagggagagccggaagcccaggtctcctgttccctgcctggcaggtgatattctttctgttaaactctctttccctctgcctattattggccaggctgtcctccaggacagtgcttgccaaagtgtggtccatgggcagcagcatccccggagctcatcagcaatgtaagatgtcaggccctgccccagaggggctgagatagaatctaccaattactggattccctgggtgactcatgcagtcaggttggagaagcgctggactggtggctttctccagaggagcatgcaacagcggtttgcaaacagggatgatgcagttccttttcaacacgtggatttgcacttcctcctggtgcgctcctccagcctgcctgtcctgttcacaccagcctccccctggaaggggttcagacttgatcctttgggtggtagggtctttcttggatagcgtagccatccattcctgctgcatacattcaacacagccttcatccttcgccatttgtctctgatacttcatactccttttgtttgacaagtgccctagctttatttattttctcatcattgttgttaagggcctattgtgcttgctagtatacacaccactatgtaagttactagttcaatttatttgttttactgctgctgtgaggtgtgtccatgtgtgcacatctacctgtgttaataactgataatattgggcctcagtacatactttttttttttaagagacaaggttttacttcgtcacccaggctgaaggactgagacacacttgtagctcactgcagccttgagctcctggacccaagtgatcctcccaccttaacctcctgagtagctgggactacaggcacacaccaccacaccaactaatttttttattttttgtagagacggattcttactgtgttgcccaggctggtctagaactcctggcttcaagccatcctaccacctcagccttccaaagtgctgggatgataggtgtaagccgccgcacctggccctcagtgcatacttagatatacttaaataaaaacttaattgcaaattacttcttaaattatccacaaactgacttggcagtaaaagtgactacaagtagtgaaaccactgtcataataaaaataaaataaaagtctttattgttagatttagtatttctaatctcttacatttcagttttggaaggtaaatttttgggaagtggtggtaataatctaagtatgtctagattcagtgatgagagctagtacactgtaggaaagagttgagcataacaatatggaatgttggtaaatgtataggggttttctttttaaagacagctttttatacaaagaaacagatgatctttttttttttttctaaactatgttagctatacccaaattagtaaatgttaaaataaccatgactggtaaaaacattttgcaattttttttttttttactttttatataattaaatgaaattctccatttggtagttgatctctcagacaaattaagtcttgccagactgtctgagaagactagtgaatcagaccctaaaaacttgtagcatttgaaaaataacaactgtgtactgcaatttataagggcataattagagaaagtttttcagtctgaagatttatactaatcttatcaccctggttttagagaacccagttcaatccaactgctgtgaaaaagccactgcttttagccacagaaaataaccagtttcatagaatgacttataataaaaaattcaaccattttgactccaaaaacctagctggccgggcgtggtggctgacgcctgtaatcccagcactttgtgaggccaaggcgggcagatcatttgtggccaggagtttgagacctgcctggccaacatggtgagacccccgtctctactaaaagtacaaaaattacccagacgtggtggtgtgcacctgtaatcccagttactcgggaggctgaagcaggagaattgcttgaacctgggaagcggaggttgcagtcagccaagattgcaccactgcactacagcctgggcaacagagtgagactccttctcaaaaaaaaaaatgcctagctgactttatcatagatctgtctgtaccttgtaggcacaaatatatttacaaaataattaatggtgatttacttattcacaataagcagttattttgcttttggtgtatatgtgacaaggtggttatgtggagtacataaaggagtaaagtaagtccgttgacttcaagatgcttacagtctaatagaaaccttgaaatttccactgggcaaggttttcttgggattgctccaaccaaatgaatgagcaggcgtctaagtaaatgaaaatcactctcatcactttccttcacattatgttaactggtgacaggtcatgacgcatgggaattgcttatgtttctgagctttagtcttgtaaaaataagtttagatagtccatcatgttcttcacattagacactcattacataaaaggttttatatgtattgtagatctttctgaaggtcatctatgtgaatgtttaaaaaagaagcaagaaggtgctataaaaagcactagaggtcaaatggtttgcgagacaaaatgaaactctccagctctgaaatccaacagagtatgatgaagaaagggaaaaaatagatcaaaaaatggcaggggaggaactcggcatcaaaccagtgataaagcagaatgtggatcagatccagacatccagtagtctgtgagcatctccatatgggatgtttgggttgagagttcaacccatcaaatacattttatccataaccataagatattctaagatcgaccaagtagagtaagcaatgtagaatcaaaggtatcatctttattatgtcctatttgtgtttcctgcttttgaggttcttagtccttttaattaactcctaatgaactaatatagttttgtggtcaccagcttctagctagtacaggcacagttgtgggttggtaggagaatgagcagtaaagccatgagctaacacaccaagtaatctgttgtgttcacaaatgtccaaaagaataacagagattaaagaaaggtaaatacagccacctggcaaaaatatttacccttttaaaaatgatggaagttatatatagaagaaatgtttttggtaaaaatatttgaaagtttgttttataatcataagtagcttgggctattttgactagaggggtgtgtgtgtgtatgtgtgtgtgtgtgtgtgtggttggcagggagagaaggagggaggcaggcagctggtagggactgtggagtgtgtcagttgggagagggaaatgagatgattaagttagtaagaatagaaaacatgtaggaaggcggatcttgaaatttcagggctattcattagtcattagttgaagatttcacagagaaatggtagaaaccaccagtaattaagaaatagcattattgtttaaaaaaaaaaaaactcccaaaccctttccctggcattctggtagaatatagttttggtctaacccaggtcccctctcatttcctttcacatccccttggttctagccacgctagactgtctgggttgtctgtatatgttctgatgtttgttttcctctgtgctgttcttctggcctcagaatcctagtgtccttgtgcctccttctgcatatgtctggactttgcttagctgatgagatccagttcagataccaccttctgtacaatggcttccttaattcctttaatttctcttaattgcaataaagctatttgcagaggaatgaaagatgctcccctttgcgctgggtacaggatgcactgaaactttcagcatggggcgcggtggctcatccctgtaatcccagcactttgggaggccgaggcaggcggatcacctgaggtcaggagttcgggaccagcctgaccaacgtggcgaaaccctgtctctactaaaaatacaaaaattagccaggcatggtggtatatgcctataattccagctacttgggaggctgaggaaggagaatctattgaacccaggagacagaggttgcagtgagctgagatcgcaccactgcactccagcctgggtgacatagcgagactccatctcaaaacaacaacaacagcaacaacaacaaaaacccaaactttcagcaggagagtagcttggttcagcccagcaacatcggtttgaagattatatcaagttttccagtcaaatgtaaccagtttatggatctgtgtttgcacggggtctgaacctcccctcctcaggtataagctcttggaggacagcctgctgcttaaggtacaggagaattcatctttgctggacatggtaacgtatgcatagagatctggcaacagaacttaagatatgtgggagaaataataggcaaaaactggaaagagcacaagtaagagaagagaaatccgcagaagtgagaagtaacagaattgctggctgaggttggaggcatttaagtgtgtgggtgtttgtgggaggcatggtggtctcctgttccttgacctcattgggcaaatattacagcacgaacatacaggtaggaatcaattgcatccccacctgggcaccttcatcggcagttggggtacaccacttgctacagtgtgatggaataagggacgatccaaaggcactcagttctcccacccatcctgtgcacaaggaaaagacctttgaattgtgtctcccctgttgtcctttgcattgtgaaagtgcatattagttctcccatccactcttttctctttaagctttagcatacggttgtttgccaagaatggaatcagatagaatattttcaccaggaagtgaaatttaaagtgcttgaaaaagatacaaggatatctggaagttccaaccggcgccattttatattttaaccatgacaagtagctgtatatcatggaactttggaaaacagagattgttccatttatttttcacagatgaaaaccagagtgctgtgtggggatcaggaagagggaaatcaaccaaatgccttattttagagattttttttttttttctgggaaattggaaacagcgcttgtttatagccaatgcagcgtccttgaaactctcctacttacagttctggagctgtagtttcctccctgaagaatgggttaaggcaggcagggtaatatgcatagatgggagtgagagtggatggcctacagggttgttaacctctagtgcaacaggaatatatgaaggtacttgggctggtggtcctgtgcagaaccagccagtaggttctaagagacttgatagccgagggtccctgggccctgttccacctttttaaaatttctatgacttagtagcggcagtaccatgcccatcccccagtgatgtttggggtacagctgcacccttggccgtgcctctgcactcactcacgagtgtcatctgacatctggctcttgaccaggatctgaggttgcttaagcaggatccaggtcaggttttttgttcatggaaggtggaattttggacctttcccccaaaaagttgacataacttaaagagaagggaggtatattgagaccagcctggccaacatggtgaaaccctgcctctactaaaaatacaaaaatagctggcatggtggtgagtacctgtgtagtcccacctgctcaggaggctgaggcagagaatcagggggcggaggttgcagtgagccaaggtcatgccactgcactccagcctgagtgacagagtgagactctgtctcaacaacaacaacaacaacaacaaagagcagagtggtattatttcctcactggaacattaaatggttcctactaccaaagagttcctgttctaatgggggtttaatataatagtaacattttattcactgggattcactcgggggaaagtattcaggaacaaagtgacaaaattaaatataggacatatgaacattgtcattttggttctagttcttacaagggcttatggtagcaacccaaatagaagtatttgctctaactaacagataaattattagcacttcagttgtttacatatgagtcagagcatctaaaatttgttcccataagtaggttgagcctccttctcagcctgttgtcatagggtctaaaaatggaaacgtgagtccaaactctttccagatcataaaaataattctgaattagtagagcataaatgaatgtgattttattcgagtgtcattttcaagttccccaggccaggttgagaccttttaagtcatctgaaattccctgtagggaggattaagaaaatagtagcagctttgcttctggccttagacagttttctaatgaggtcagagcctctcaccctgggagaagcagattcactttgccccttcagcattggtttttgagaattgctgtctgaagctattgcatagacaaggtcactttttaaaagggtacatttctgaacctggagaaggagtgggttctgaatgactggctcttctgattaacagagctgtatatcaagctgtgctgaaaatactcctcagatatattaggccacatttatgcatgagtgagctcactgtcgtgacatgggagtgaacctttgctgattcgagatcctggggtgccttcactttggaacactgattctagatatttaatagcagttttaaaattaggctaaatgtagtctgactgcaggattcattccagtgggaatttttttgtttgttggttagttttttaagcctgaatatgaacccaaacatgtttcccaaaatgtgaaatgaagagtgaaaacctaacaatgggataagaaagataatagataagagattatagttcaaactcggcctgcactcaggaaatggaagcaattcctccccctcatcctgcccccctcctcctccgcttactcttccccctcctttcttagaatgccgggggctagcctgttagttccattacttacttgccttgtgactcataacgttttcatcttgggtatttttctttcttggtctttgtaaaaattctaagcatcatagagcatatcaccnnnnnnnnnnnnnnnnnnnnnnnnnnnnnnnnnnnnnnnnnnnnnnnnnnnnnnnnnnnnnnnnnnnnnnnnnnnnnnnnnnnnnnnnnnnnnnnnnnnnnnnnnnnnnnnnnnnnnnnnnnnnnnnnnnnnnnnnnnnnnnnnnnnnnnnnnnnnnnnnnnnnnnnnnnnnnnnnnnnnnnnnnnnnnnnnnnnnnnnnnnnnnnnnnnnnnnnnnnnnnnnnnnnnnnnnnnnnnnnnnnnnnnnnnnnnnnnnnnnnnnnnnnnnnnnnnnnnnnnnnnnnnnnnnnnnnnnnnnnnnnnnnnnnnnnnnnnnnnnnnnnnnnnnnnnnnnnnnnnnnnnnnnnnnnnnnnnnnnnnnnnnnnnnnnnnnnnnnnnnnnnnnnnnnnnnnnnnnnnnnnnnnnnnnnnnnnnnnnnnnnnnnnnnnnnnnnnnnnnnnnnnnnnnnnnnnnnnnnnnnnnnnnnnnnnnnnnnnnnnnnnnnnnnnnnnnnnnnnnnnnnnnnnnnnnnnnnnnnnnnnnnnnnnnnnnnnnnnnnnnnnnnnnnnnnnnnnnnnnnnnnnnnnnnnnnnnnnnnnnnnnnnnnnnnnnnnnnnnnnnnnnnnnnnnnnnnnnnnnnnnnnnnnnnnnnnnnnnnnnnnnnnnnnnnnnnnnnnnnnnnnnnnnnnnnnnnnnnnnnnnnnnnnnnnnnnnnnnnnnnnnnnnnnnnnnnnnnnnnnnnnnnnnnnnnnnnnnnnnnnnnnnnnnnncctcctttcttagaatgccaacaactagcctgttagttccattacttacttgccttgtgactcataacgttttcatcttgggtatttttctttcttggtctttgtaaaaattctaagcatcatagagcatatcacctggagaaaagacctacgttcattatttaatgaaggtaaaaagtaaagaattgagtctgcatcctaagaaattagaaaaagatcaactaagtaaacaaaaaaatataaaaactaggagggaggaattaggagatgataagatttaaaagttatgtaaatccaatagctggttatttgaaatgaccaataaagtaaactctcattatcctaactcaggaacagaaagaaatcatcctaacttagaactagataataggaatgagaggccgggcatgatggctcacacctgtaattctagcactttgggaggccaaggcgggcggatcacctgaggtcgggagtttgagactagcctgaccaacatggagaaacccatccatactaaaaaaatacaaatttggccgggcatggtggcttatgcctgtaatctcagctactcaggaggtgaggcaggagaattgcccaaacctgggaggcagaggttgcggtgagccaagagcactccattgcactccagcctgggcaagaaaagcgacacttcgtctcaacatcaacaacaacaaaaaagaaagaaatagataataggaatgagaaaggagacacaggagatatcaatagactttataagaaaacattacatgcagccctgtggcaacacatttgaaaatatagggctgacttcttaggaaaatacaaattaccaaagttgatccaagaagcatggaaaagttgaatagaccaattactatagaagagataggaaagatgattaaaagttaccattgagaaaggcaccaggaatccatggatttccagctgaggttttgtttgtttgtttgtttttggagatggagtttcgctcttgttgcccaggctggagtgcaacggtgcgatctcggctcactgcaacctccgcctcccaggttcaggtgcttctcctgcctcagcctcccaagtagctgggattacaggcatgtgccatcatgcccagctaattttgtatctttagtagagacggggtttctccatgttggtcacactggcttgaaaaaatagaaaatttgagtgttatttttactcttctaggacatactaaaacatggaaaggttcccagttcattttataaaaccatcaaaattttaatttaaaaatctgatgaattaaaaaaataaaaataaagatcaatattatttatgaaagtaaatgtagaaatttaaaataatttattaacaaatagactcttgggtgcatcaaaacacgaatgcactataatcaatagttattttccagtaacaccagggtgattaactgttagaaactcatcactatcatcagttgttacacaatcatattgaaggagaggaatatatgaataagtcagtagaggctagaaacctatctgaaaaagtttagtagccattcctaatatagtacaatctgagaaagcgaactaggaataaaaataaattacttaaacataaaggccatatatgtgtacacaaacacacacacaccacagcaaatatttcctaaaagacaaaacactaaagccattcaattaaaattaggaatgagagaagaatcttacattttacaattagtatttaatattatcttagaggttcttgtgagtggagtaagacaatgaaatggtcatatgtctagaaatcgcaagagcatctagtaaaaaatctaaaatcaacagaaacaattgtcaaggaagctggataaaagataggtctctagaaattatcttttctgtgttttgaagataagcacctagaaatggaagttaagtatttctttcacaatagcagcagataacctaggaagacattgaactaatacctgtaaccttcttagtgaagaatgtgaaatataatctagagaaattaaaacatgtaatgcctgaatgtatcttattacaaaattaataagtaaatttcttgtgattccggttagaatttccaaagtggtgggttttctctttaattgaataaaataatcctgaagtctttatagaagaataaatacgtactacctgagaggagccaagacaaatatggaaaagaaaaccggtgagggcagatttggcttacaagtaatgacaacatgctaagaataagaagtcttcgtgatcaaagcaatgtggtattgatccagaattacataaatagttcagtggaacagactagagaatctaggactgtgtctcattaagagagtgaatgtataacaagatgatagttcagtactgttgaggttggtactggcataaccagttctttatctggagagggggttgggggaacagcacagacctctatctaatatcataatcagtaataagtcccggaatcttcaaacacttaaatgtaaacaagcaattcaacttttacaagaaaatataagaacctattttgtataatcttggagtgagggagaatggttaagcaaaatttgatacgcacaagctataaaaagagacacactttgaacatatattttatttttatttgtttattttttgagacggtctcactctgtcaggctggagtgcagtggcgcgatcagggctcactgcagccttgacctcccagactcaggtgattctcccacctcagcctcccatgtagctgagactacaggcaagactcactgtattagttctcatactgctaataaagacatacctgagacggggcaatttagaaaggaaagaggtttcacagtttcacatggctggggaggactcacgatcacgggtgaaggtgaatgaggagcaaagtcccatcttacatggtggcaggcaacagagtgtatgcaggggaactcccctttataaccatcagatcacatgagatgtaattcactatcatgagaacggcatgggaaaaacctgcatctgtgattcagttacctcccaccgggtccctcccgtgacacgtggggattattacagttcaaggtgagatttgcatggggacacagagctaaaccatatcagctaccatgcctagccaattttttgtggagacgaggtttcaccatattgctcaggctggtctagaactcctgttctcaagtgatctgcccacctcagcctcccaaagtgctgggattaacaggcatgatccaccatacctagcctgaatatatatttttaaacttttctgtggcaaaagatacgtgattaagtcatagatcaagaagggatatttgaaacagacatggggttactatctataacaaaaaacttacaaattgttaagaaaaccacagaggaaaaatggacaaagaatgttaatatagaatacacagataacaaatgcagacagctagctggcaaacctatgaaaaatagttcatttttgctagggaaatgcagattaaacaatgagacgttactttaaacccatcagattggtaaaaatagagaaaaataacactttttgatagcaaggctgtaatagaagtggcaagtggtattatttctcataatactgatggaaatgtgaattatgggcagttgggaaattgaaaagcagatgggcaatgtatattaaaataaaaaactatcatacctttcttctaagcaacctttgtcctcggttatttgtcttttagaaataaaaaatgtgtgcaaagtcatatgtataaggatatttattgtaccattatagtggcaaaatactgaaaatatgaaaacccatcagttgaaaaacggccaatttatggactgtttgtaccatgtaatattatgagagaactagagctgtatgagagttggctgtggaggaatttctatgagaacttgatgaatgagaagcaatgtgtagaaaaatgtataatatccagttctaaaagacgcattcctcctgtgcccatatgtgtaaatgtgtgagtgtggagaacaagatgaaaatgctcattctgtatgttaagcagggagtggggtggaggttaatgtggaatggtgggagagtggggtggcagggatttccaagtcactcaccagtgatgagtgttaaccacatccccatttttttcctatgaaggaagctgcaatgctgtggtttgaggttaaacatgctggctccttctcttaggtcttgatttggtttttgttgttgttgttttttttttaattctagtctgttcttgttttgctgtgctgatatcctcttagattttacgagcatattaattgtgagtatttaacattcttctttggtttattctgagaccccgtttgcctgccctttggcatcattggcagtttttggtggtctactggtcttcctgtttgtgcctctcgtttgcccctttttcactggaatgtgccaggttgaagcaatatgtagggcccggtgggatgggccaggaggtggcctttcagatgtggctcctgcatggccctgcttgctctcttgagctgcctgcacttcagtcttaggaccacattcctgctttggcctacatgaagtgcaaggtagcagtgggaaaagcagagaggaaatgaagcttcctgataaatcacctgatcgctgccccagggttagtcactctagcccccttggatctcttgactccatctcttgatttgtttcttttgaatttctggcatctggagaatacttgtacagcagcagtcccctggttttgtttttctttcaacccaagcccatcccatatctgttcatgtgatgatactgtgtcttattttcccaagattcttatgactgtgatatttagtctgaatcagagaaagagagagatagaaatgtacactcagagggccacttggatggaaacttctgttgatctctccaagccttagtgggatcatctgtagagcagggataataacagcgcctatctgttactgttagggttactgcaaagattaaaataggtggtgctcttaaaagacttagaacagtgctgtcatatagtaaggattccataaacattagctgctcggtttgtgtgtgtgtgtgtgtgtgtgtgtgtgtgtgtgtgtgttttgttgttgttgttgttttaaacgggatcatgctggaaatgatagattgcaacagagctttggggttttttctctaattaatagatctaggatgttttctgaggtgtgtcatgtttttaaaactctgtggtatttctgtttctttctttctttcattttttttttttttttgttgttgttgttgagacagagtctcactgtgtcacccaggctggagtgcagcgatgccatctcagctcactgcaacctctgcctcccaggttcaagtgattctccttcctcagcctcccgagtagctgggactataggcatgcaccaccatgcctggctaatttttgtatttttagtagagacagggtttcaccatgttggccaggctggtcttgaactcctgacctcaagtgatccgtctgccttggcttcccaaagtgctaggattacaggcgtgagccaccgtacccagcctggtgtttcgtgatatatctatgtgtgagggtttctgtagttaagttcccatagttgaattcctggttcaaaggacaagaacatttacaatgttcatagacgttgggaaattgccttctgtagtactgcactagtttccactggctgtagtggttgatgagagtaccagtttttccctagttcaatattaacccattttatcagtcttttcatcttcgacattatggaaggtaaaaacatctcattttatgtcttcagtcagtgatgccaagtatctcttcgtgtatttatatttccatttttatccagtgccaactcacatccttctgtcaatttttcctttgacctattaatttttcattgataagaattctttgtaaaatgggcagtttaactccccatctgtcatatgttttttctcatttgatttattgtatatcttgtatagcaccttttaattttaacattgtgtttttaagtgtcttttctttgttgacttggaaagctaacaactacttacagcataatttccttctgttaaaaacaagaaggaatttccccactctaattgtgaaaattatacatttttctaagtctgaaaaaaaatagaggaaaaaacagaaaaaacaacagaaagaacatcagtcactcttaatattttggcattttccttttagttgttttttaggagagaatgtatatttatacttcgcatcataacatagatatagtctattttggtgatttattccaatatgtaatatatgtttctgaatgtacaatatcctatttatcatatctgttaagtttgtttccagtttttcatttaagagagaaaggtactgggaatatctttgtgcaaaacaagaatttttttttttttttagtcagattctgttcctatgatacctccctggaaatgggattcctaaattaaagaatattaggatttaaatacttttggtatagattaccaatttgctttcctaacgtgtggtactagtttatgttgcaatcagcacaaagactcactgtgccatttatcatcagcagagaagagagcagccctgaagatttgggggaggagtgttcgtagagaggcacgtgaaagtgagtttgagaggtttgagaagtagccaggtcagtggggctggggaagggagagagttcatgggggagggctggagatgaaggtaaaggagccatggttctttagggctgtgtgggtgctggggaatttgcatttcctgcttaaggttgtagtaagtcagcctggagagttgcaagaaaggagtggcttggtgtgatttattgtagcaagtgagagtgacccagaggccagttaggaggctgttgcagaggcctgagtgagagaggatggtttaaacaccaaaatggtaacattcagaatggagaggaggagatggtgggagattaaatttggggatggagcccttaggatctgttgattgactggatgtgtaagagagaaagggaagagcagaactgaggaaatgtcctcttgaactggctgggggccactgagatgggacagatgcgctggggagcagtgcagaggtggaatcactgctccttttaggtctaaggcatcccttagatctccaagtggatgtgtgaagatggtggtagaggagaatggagctcaaaagaggggccagagtcatttccatttagatggtctttacagcctaaggaactggcagatttcactaaggttgaggtctttctttcctgtgaaaatgtgatcaggatcctaagtaacagccctaaaaattaaacattaggaatacaaggtttcataaattaggaactgtctgtagctgccagattctaaatgttttgaggatacaaatcttggggtcttttcaaatgctttgagcagaagaggtacatcgtattgtgtttactgaatggcatttaaagatgcaggagacctttcccccttcttgatgaaacaatttgcctttcagatgttttgttatagtgagttgattgtaggaccttatgaagcatgtaaaccacacatttgtaaggcattggaagaaaaagctaacgcgagttaggagggatttaagaccatgtgaggaaattcaagcctatgttgttatcaccaaaccttgcctgtgttatgtaaagatttttgcctgtgtcatgttatcttcgttgtgttcaatttattcctccccctccaagtgtcctagtttctcctctactgtagctggttttgaacaaaatagagaaacttgggtctcctctaccctcagcatctgaattcttctcatttggttactcactgtgttaaaataagtgatatagtacattcttagcagtttgtttatttttaattttattttttatggggctagggtctcgctctgtcacccacgagtgtggtgccatggtgtgattgcagctcactgcagcattataactcttgggctcaagtgatcctcctgtcttagccccacgagtagctggtattacaggtccatgccaccatacccagctaatcttagcaatttttaaataacttttttttccgactgtaacagatttagatattggaaaagataaaacataaagcattgatctacctgtagagccaaatagccacagggatataaattggttaccatttaattttatttccatctatatttggctatatttatatttatgtatatggaaatagtttatgaatttggaatcatactatgatattttttagaatgatgctttttaaactattttatggtaagcattttagtaaagctcgtaatgttatttttaaaaacgtacttttcgaaggctgcagagtatggataaattcatgatgactttttagaggaaaatatcaagatgatctcactaacaaatcctgagattaaaaacaaaagcaaacaaaatacaaaaactgaaccatctttggaatactatgaaattcagattttatgttcttaataaaatcctgttttgaatgaaatcagtcttcatgcttttcttattccttttggctatgttgcctacagttgaattaactgtttttatatacttcctttgctttgcattgaaacaagctgatccattgtgaccctttgtggtatttcataaaaccacaccctaaaaactgcccagtcttttaagtgtagtcaacagtattgagcaattttttgggtaatattgtcggaagtgttaggtgccaaccaacaatggcttattgcttacatttaagtgtaagcaatatacaattaaaggaatgtcatgactttttaacttcattttgaaatttgagtttagaaaaaattccaagggaaatgagcaagaatgaaagcatcctctcctactgccagacttctgggagacccacccctggtcttcccaggtgtctcttcagtgaccttgttggtcgttgagggctgtggaaagttctagggaggctgctcgtccctcctctccttttgcttattgcattctgcccagattataaaactgaagtatctgtcttaagacgccagcagctttttcttcatcaaatccagacacatcgaatcccccacaaccaagaattacccagccacaaaatgtcagtagtgccccggtaaaagaaagctggttttagacttagtctcagaacctggccatcttccatggattatcccgatatgtgcatccttgtctcttttcactatagcctggtgatcatggtggcagttttcattttgggacactggtgaggttagaatagcttcaggcttccctcagtgaatagtattgtgaaggcagtggtggtaacattgtgttggagctggtgtgagggttgaatccactctgtagcctctgtccctagatcatggcgctgctttgattgggccctaattttctcctctagacaaaaggaattgaactaagacttccagcattccctccaggcttaacattttttcatttggtgctgatggtcactgactattttccagttacattttaatgcaagtttggcagaagccgatttctctgggttagggaaaatgacataggtggcagggaggtggatgtacaccatttgtttgatcagtttgcctagaatggaggtggcagaattggagttggaaagatcaaatgtagcctttttttcccttccagaatgaggcttttctatgcatttttttgaggcatgagaacctcatgggacaaggcaaaagtgagcatactcaagtgaagtgtatggttatgggggaatggttattagaaatgtcaattgtctcaattttttagtattaattttcagagggaaacagtggtgtaattagtgttgtgattgtttgccagggcggtcgtaacaaagtagcacagactgggtggctcaactaccacaaatttgttttctcagggctctggatgtccggagcctgcgatgaagcaggattggcttcttctgcggcctctcttcttgacttgcagatgctcctctgggtcttcccaggtcatttgtgtacctgtgtccgtgtcctaatctcctgttcgtataagggcacagtcatattggattgggacccacctactaacctcattttaacttaattacctctttaaataccctctctctaaatacagtcaccatctgaagtattaaagacttcaacttaggaattttgggcaaatacaattaagcccatcacaatcaggtaacatttggtaggacgtgtagatgctttttatctttaagggaataggcaaatcgttaaaaataaataaataaaaacttgttcaacttgtttaggtacattttcttatagtgtattgtggttcttatttttttaaccttccagctagtgtgtaaattggaaacattgtagcttaatttgatagttttagacataatcaaagatgatggaaatcttgttcttaaatttagtctattcagcaacttgtgtatcctcaactgctgaagactgaaaacttgagatgttcctcttgttttaagaatttgactgaaaacgggctgggcacgatggctcatgcctgtaatcccagcactttgggaggccgagatgggtggatcacttgaggccaggagttccagaccagccttggcaacatggcaaaaccccaaaaatacaaaaattagtggagcgtggtggctcacacctgtggtcccagctattcaggaggctgaggcacaagaattgcttaaaccccagaggcagagactgtagtgagatcgtgccactgcactccagcctgggtgacagagtgagaccctatctcaaaaaaaaaaagactgagaatggttggcactgtccccctgtctccaggagggtgaatgtttctagctgaaccctggtgcccacttgctcctctaagccttcagcagtcctcccagcctcaaggggtgatccgttcatcttccccccacctctggaaatcccagcgtttgaacgctggggggaactgcaagtctagtttacagggtttctcagctgagatgccaggaacacttcgcgagtgagcatgccaccacatttgagtgcatatagaaagttagctgtttgctacaactggggacacttcctattagagccgcatctgctggggtggagggctgcatgggttggagagtagggtgtgacttcttccagcaagaggaaagagaagtagcatagtgcccatcgcaggcagagagcacatgtttgacttgctcttggaatttctgtagagtaagggtggtcaggttgccagactacccctcaaacgaggacatggtgctgctgggtcccagggtagagctctgctggcaccttcaaggccctgatttacacctaagggcacacaactgggatctgaaaactgggatgcacagtacagactgcagatttacagggcggggctgtctctcatctgactattgattcttttgggggctgtagtttgtatcatagttatttttgttcctgtttttttcccctcttcaagacaataagcttttggagggccaggaagttgtgttcccatctgccgagtgtggggcctcgagggccagaacctcagaatgtagaagctgagttagtttgtggaagggtgaagggctgacctctactgttggaaatgccaaaatctctgatctggctttaaataagcaaaacagccccgccagacatagagtcatccacaaaacctcatgacctctgttattgcccatcctgtgtggaagcccactgagaacttcacttgaagatgctgcaggaacaactgcagggaacctggagataaggccccgggtgatgatgtaagctaattgctgagctgggtggagctacttaaccttatggtaggaggtggagcttgacgcaacccccttttccaccaacaagcatttctttctacctgtcattgaagtgaatcatcagtataagtagcgagctgggcgcattccttctcagttgtgttaaaacttgctggtattcccccggtatcagcagaggtgtgtacgggcactgctttaaaactgggaaggaggaagacgaggccagggagccggagggtcaccaaggtagatttccagcagcgctagtccagctgaacactttccagccttgtttttcagcagctttgaggaaaagtataggtaagaacaaagacaccactgtatgtttgctatatgaatgcataacatctgttcttggtgtgagtttgatgttggtttaatactgtttttatgtcagcggcatagttctagcatgtaccaagattttcaattttaaatgctttttggtgttcacagttagctataattggtcaattttaccctccttatgcataaaaagaatgataggcaaagaatgagccttgaaaagaattgggatcagaattctggtcccctgttctttgcttcttaactttcttgactgtttagaaaaatgtacagcttttcttccaaaaaccaaagcaataatacttttatttttgaaaataatggaaaacagagaccgctgaagttctatgaatgaggttttctgttttagaaatcacaggttgaggaggaaagaattgtgttttccttcctgttctgtttcgagtctcagtatttctgacttagaaacctcctggagaagagggagataccagctctcctttgtttcaagtaaaataccatcttaggtcataaaatagtttgcttggagaataattcatggcttatatctgaatttttggttggtagcaacagaaatctttctcttcctcggtatgagtaatttggcttacatgatttagactaaattttattatattttttgtttgagaaaacaaaagtcaaagcccagaacatattcaactgagtttttccctcaggttttctatcattttcccacccttcctactcatacatgtgaatatgctgaatgattaacatgtgatttttgtttctttactgtctcatttcatggtgattcataaactgttagttaactggttatagtgtatccatatgttggcaaagcttgaaataaatttgagtgcaggccacaccttcgtattaatgagccgggttactttcagtaaagtatttctgatgtcattaagtgttaagatggccggaattctaaagacaataaaaatgtatcaacaatatgaaatatcaaagcctacagtcaaatctgagttattctttagtacttatttcatagctattctttaatgtttattctttaatacttatttcacattgaaaagtactttacacatgtttgaatgagatattgccagtgaaagaaacaaaaggaagcaaataactctataagggaagtgggattttaaagtatgtttgtgctggccccaggctggtgagtgagtttcattagcaatgaccaggaagagaaagaatgccacagtggtgggtgctgaccttttttttttttttttaaaccttttttaatgtctgtaaggaatacaaggtgaactttaattcttgtgggaatctagtaagatggaagtcaagaagagaggaagaaatgctttttatttagttaagaggaagtaaacatctgtattagttacagatgttatgccttaacctttttcattcctattgtttttatgaaaatttgcctttttaagttaaatgaaggttttctggagtcctgtattgcaactaaatgttgatttaaaacgacacatttgggacattttcttggcactgtggaatataatgaaaagatataaaatgaaggcaggtatgaaattatatgaattctgctacttgagtgtagaagttttattccaaagtggtttgtttggtggatgtggtgatggtggggggctctatgtacttattaaggcaagtgatgggacaggagcttttgtggtcttgacggttctgttgggatgggagggttgtttgggatttttatgtttcattccaggcaatgtttattttttcagcctgtacttcttagggttttaccaagtcagttttcatgtgaagccattttcatatcgtttctttcaccttgatggaaatcttttccttcttatgtgctttgagttaaatatgatgtagtgtgctagtaacatagacggggctttcctttctacaggtgggcttgaagtgagcctgccactcgctcaccttgaatcacggaggtttcagaggccgttggccttcagggcaatggcagaagcacgtgttctctgctgttttctgagtctatcttgactgcgttcccagtggcccagaattccccaagggtcactcgacacaccctcgtctacagtaaatatttgtgcttcctctgtgcctggccaggttttctcagtacccaggagcacaggtgggcagtgggatgtgggcaggcggtacccagattccctcccacaggggccacagggaggacttgggcgcttcctgccaagagccccctgcccttcagactaagtggaaatagagatccgggagtccagtggactcagtggagttccgtagaatacatggaaaacgcaccgctttcagtgatgtaagctgtcttgttcacttcacgattactcatctggcctgcagcaggcaagaggatcacatgcaattataaacagcctcctctgactaaggtcagtgactggaaaccctgtcacgttatcagaggtcatttggtcatagattcttgggcagaagccattgagagtcctgggggtgtgatctttgagcctttgccagtgctggggtttgactccttttagctcaattaactgggtccaggagtttattttggccgagatctgccatgctgagttgacaggcttgacactggaaggaagtctctaacttcattagaggaaatggcgtggcaggctttaaggcattttgatatactccactttttctctcttgccctgttttgttgaggttttcagggccataactgtacctgaggttaatcagtgagtgatctatctgaaaggaatttgttctctttgggcaccgtcctgtgtggtattatatttgtataactatttagcttaactcattcaaaaggctatttaagtcacttgtcctgttcattacttgaaaacaagttgtcttctctttattcttttagtcagttaccaaatatttcctaagtgtctcttgtgctagacattgaggggcactccttctccctttcacttgtctgtttttgttgagctacattttttccttaagtcagattgttcttttcctgttacttttgttttcacttgatttgtttatttatatttaaatatgtactttaacagtcttgaagcattggtctgaatgaggatggtgatcagattgggaaaatgccccttaattttggtttaaaaaaatttattttctttaaattatttgtttattgataggggccacccactccaggtgagtggtttctctgtgtgtatggcagaggaatgctctgtgtctggaaaaaaaagtcacttagcttgaaatattatgaaagctgaagagtacaaatgtcagagagaaaggggtattgggggggaagagaatgagaagacaagacacagtcagggccctgtcacccgtgtggaactgcaggtccctggagagatgatgcatttatccctttttagagatattgccattaaaagttgatcttgagcatgacacagaactgaaagctttgatgacaaagccagcatctcagtttagcaataaccaggttagggaaaaaaccccagaaactcaacagtgagattcagctcagcaatgtgggcggggaacccactgtcccgccttgggcagggagcagccccagccgcttcatctgcctgatgctgggttttatccgcttcacaattaaatttcctttttgttatgcttgcgcacatctatatttggctttgcttcttattttttaagaaaggggagaagtgtgggcaaggtaaaatacagcttgcaagctcccaaatggcaaatgcaccagttagagtctaagtggcctcccaaccttaaggtgaaattcatttattcagcaaatatgtaccaagcccatcagggaccactgctcgagataccagtgcaaatagaagaggccaagggcacattattaggtccggagccagtggcctgcacagccatctgtgaccacctacctctctgcttgcagggaacttcagcctggtggaggagacccataatagccaagtcaactgataatagaattagtagtagtgttgagggacataaagaaatcagggtaaggccatcacaattacatgggtggatgatcttttataaaacagcacagttttgttttcttctgccatggtatctcctaacattttccagtgtgtctacttgcagttaatatggaagttgcggctgacactaggttagtggttaaaagaaaacaagaaaaccaacctttagaaatctttagaaacatcattatcatagaaagctataaactcttatgtatagaagggtaagtggccattgatcttggagcagaatgaatggatatttcctggaaaaaaatatttccactcatcaaagatactcaagtctcttctcatctaatcaatattggaaactaggaatatccacgcctatggaatatcctcagagagaattaattattctgccctctaagaggtatagtagtttagacttagaagtaaaggcctgaacttgaggctgcaccattgaaggcaaaagtgccctttatctcccagctttgtcatttgccaaatgcaattgtgttaaattaagtgacctccaatagcagagctctatgttttctcccctgacccccaagtcaaaattgattatagtaatccatcaaaccaggcctggcaaatgatgttttgcaactaaaggataaatactgagggggagggacgaatgtgaacgcatatgcagagcaacacagtcatgagaccattctattacttcctaaatttcttaaagcttttctgtcttttctgagcttctcaagtgagcaggggcatgagttcctgtgttgtgcctggggacagggaaggctttgggacctactgtggtcttaagtctgagcagtgctaatagcctcggctcaccaagtgctgggcactgtgctagagggtgtacaaacctctcatctcatgaggcctcactgctacagctgacagagatgacatccagttgtttttagttgcacatggcagagctagaaaacaaaccagggtgtgtcagactccagagcgcatgccctctgtgatgccgctgtgttaccctagatcaaatcaaccaagccatccgttaaaaaaaaaaacctgatctttgtcaaatatgcaattgttatatttttgttagagtctgcctctccagtgaacgatattaatttccttcaagtggctactcacagatatcacaaaatcagaaagctgcctaccctgcagcctgtatctgcctccacgtccccacatcagtcctccttgctgtgcttcttgtctctttagtttttatcatcttctaacactgtgaactttagtaatttattctggattgtttgctacctgtctccccttggtaaaatgtaggctccgcagaggtagagcgttttgtctgttttcttcactggcatatctcaggtgcctaaaacaaccatgccagacatgtagtggtgccagtgacaacttgttgaatgaagaaatgggagaaaaaagcagaccccggagacttaggagggtctgtgtgagggagtctccaggcagtcttcctgggggtgtcctgaaggacctcctgatcgtgattttggtcagtgtggaggctgtggtttcttctgagctgtcagtatttggaggtgagttgtctgcaggtcacctcatcccacctttacacattagtaaaatggaattcgctgggtgattcttaggactgtgcggtcagtcgaattaccagacgtccctgcatgctctgtctaagggctggagtctgctttccttgcttctcttctagaaagaggtctgtccacaagggattagcctcgcgaagttcctactgttgttcattgacccagtgagtgttttacccactgtgggtttttcctacctaattgcccctctggttttcagtgttcaacatgctgcagttacgtgttctgctgtggttttacttagcttaatcctttattaattgcctcttgttcaaactccctaagagcagattatccttctctttcagcttctgctccattgctgttgaacttttttttggtcgtgacatcagaaaaataaccaagtgtgagtctgataatagcaagtaaggctattttatttctatccaatttaccccaaatttgagcagtattacaccttaaaataatagagctggctcttgcccagcatgtgaaaagtgtatgcttcacgatggacagatattttccagtatctacttaccataaatctcaagatttaccctaccccactccagccattacccccatgtcccatttgcctaacctaccctagggccatctcagtgccctgtaaagcaacctttgttgcagacccactgtgtgactggaatgtgatgcacacaagtgaccaaggcatggccctgttcgcaaggagcttccagaccaatagcagaaatggacacataagtaaacaactgcgctactgataggcttctgccaacaggagtggagcttgagggccaggaagccttcccagaggcactggagcttgttttaacgttacgtgcatgccaggtggggggcaggacatttctagcagaggagaaagcatgctgtgctctgagaactaaaagtcatagtcactccacttggtgacatgtataaggcacatggaatagggccagagctgggcagaccgtgtatgccacaatagttcgttgtaggttacaaagaaccagtgcagagtgggtgaggcataggctatttgattaataatttggctgcattgacaagatacggaaaaggcgaggttgggactttccgtgaattttctcctcaaggtgcttaatcagtgaggttgggatggccggagggggccctcatttgcttgcctggtgctcaagcctgaggtcctggcctttaatagtcagggaggtctgtgtggaggcagggtgtgagccccctccaaggaaagctgcagtgtgaaaagaggcccaggatgagcgttggggagtatccacatacaacttgatattcctaaagtctcagttctttatgggaaagcccatgcactcttccacacttggaattctttgcaaagtgagtggtatttgagcttctttagagtcttgctactcccaccagctgtactggcatcaccagggagcttgttagaaatgcagattctcgaggcgcggctcacaactacccaatcagactacattttaaccagatcccaggcaatccctgtgcacgtgaagtgctagaacactgctctgcggtaaaacgactttgctaaccatggaagagggtgatttttttcccttttcctttggtgttttttataggacctatttaccttttagaactttttcagaattatggactgcagaatatatacagtgtcaatgtcattagcaattcattagtgatatttggctagaatacatagttgtttccacacaaatgccatttcttacattgagatggcacatgtctggttaggacttgggctcatttgtaaggagccacgctgcaggtaggcatgctcccgggacattagttgctcaggtttcaaactgctgccccagcatagcagatggcacggtaacaaagtccctgtgcactctcacattgcctgcggtgatctatcacacattttgtcccctaataacctagctgggggggagctcatgtctctgtttgtgctaatgctcgctgtatccccaagtggcagtacttaatataattgtcattgctctttaatattatctcattccacgtcagctgcacaaaaatttgaggttaattacaatgaatgttttctcaatccttgttattgagagctgtttaatagtttattttgtatgtgaagattcatatctagattgaggcttatacaacttcatttaaagacagctttttcggctgggcgcggtggctcatgcctgtaagcccaacactttgggaggccgaggcgggcggatcgtgaggtcaggagatcaagactatcctggccaatatggtgaaaccccgtctctactaaaaatacaaaaattagctgggcgtggtggcgggcacctgtagtcccagctactcggaggctgaggcaagagaatcccttgaacccaggaggcggaggttgcagtgagccgagatcgtgccactgcattccagcctgggcgacagagtgagactctgtctcaaaaaaacaaaacaaacaaacaaaaaaggaaagctttttcaggttggaaaaatatcaacagcagacatgaaaaagcatgaaaaatgacgctaagaatgtaagcaactggaaacaaaaattataatggtgcatagtgagctgaagatctatatttaaatgtgaactcccctttcagtttataagtgattactaacagcctcatcaggtttctggaattaaatgttttattatttcctcccaaagttagtcctcaaacattagtatttcttgtgttcttttgatttgaatatttgtttttaacacacaaggatatcaactctataagtcagttaatatgttcatgcttttagttaatcgaaagtggcttatgatttcagtttttggtatcaggtgatgttgcggaagtgaggttcactgtgaagcttcttctttttttttttttaatcattttgttgtttctttgagtgtatgtgagcttataactcaagacactatgtgaaatgaccctgtgtttcctacattatagaaaagaggaaaatgaagcaagttcaagaaaattagatttatgtggaaaataaattctgcatctagttattcattatcaggtatgagattacaggcatgagccactgtgcctggtgacctcatttgaactcgattacctctgtgaagaccctgtttccgaagaaggtcaacattctgaggtgccattgtcaggtatgaggtaaacacactgagaataccacattttggcaactcagacaagactattttccaaacatgtaaccctgggaagaaggtaacctatcatagtgtgtgttaagaagtcaagcaaccaagaaatgttaattgaaggcccgttttgtacaaggttgcatggaaaagacacactagcgtaagacatggacagtggccctgagtgacgtgcagccggtttaggcgaattaagatttacatacttgaaaagggacaaacaagactggacgtggtgactcatacctgtaattccaacactgtgggaggtggaggcaggaggatcccttgaggccaggagtttgcaaccagcctgggcaacatgggaaaacccctgtctctacaaaaattaaaaaaaaattagccatgtgtggcagcatgcccatagtcccagctactcacaggggctgaggtgggagaattgcttgagcccaggagatccaggctgcagagattgtgccactgcagcctgggtggcagagcgagaccctatctcaaaaaaaaaaaaaaaaaaaagaacagaaaaggaacaaacaacagacacaagattccatggaaaagggagtggtctaagtattcagactgtaggaattcagagagtggagaggctggttattatgggggtgcttcatcctggggagttgagggaaaggaggtgctggctgcctggagcctggaagaatcaaagatttccaaggccatggggggaaagcatgaaggatgagtgaatagacaccagggctgagcaccctgaaaactgtgaagatactagattgacctgtttggaaaaccaaacagatgtggctgttattgacaagtggttttgtttttgttttgagacagagtctcacttggtcgcccaggctggagtgctgtggcttgatcttggctccctgcaacctccgcctccaaggttcaagcagttctcctaccccagcctcccaagtagctgggattacaggcatgagccaccatgcccggctaattttttgtatttttagtagagatggggcttcaccatgttggccaggctggtctcgaactcctgagctcagatgatccacttgccttggcctcccaaggtgctgggatcacaggcatgagccactgtgcctggccaacaagtggtttaaattggattctccatttcccacctaatagaaagtcggaagcatagggcaaaagtaaaggaaggaccctgtgttctgctggttaaatataacagaggtctgactccatggctattataggagaggtgcattttgttctatgtaaattatcttgatgtgtcccctgtgcctttaccccatgattatttagcacttttttctccacggtcacagggacagggagaaacatacacccataaaacagtgtcatctagaggcaaaaacttgtaatgctcaagcatgtgctctgacgaggtggggcagggtgtgtaggaacaacactctactaattattacagagcttgctctgcactctctgtagaagtccttcaatatccagtctaacacacacagtaacttaagagaggattttaaaaaatcaaaatgccctcagatttgtattggatttaaccaggctgagatccctgagatccaaatataataatgtgtcctttttggatgaatcagacacaagcaaaaatctccagtgtgtgtccagctttagaggtgtagtaatggattccacagttcacgctggtgggccagccaagacttttaatgctgatgtgggcttcattctttctataaactccctttcttcttgatagtgcatgggcccaggggttccaaacatgggtacctgccgtaattgatctgtgtaaccggagaaaatacatatcctatggcacccttgtgtcgggatatagggggcatcaccgtaatgtggctctttttctgttgattatagttttttctttctgtgatcacacaattgttttatcctcgcttaaaaaatttcaagaagtgcagcactcagaataacagaaaagtcaggtgtctggtggtttgtttgcacatttaatagacttgaagataaactctctaaacatttattttgcaagttgtttttctgagagttgaggggaaacttttgccctttggtctccctgaggaattctaggatttcacaggtaggcgtgtgttttggactgcaggctgaacgtggttggcagggtggcatgaggagggcacatattttaagcgttcttagggcagatccacgatcctttacctgccatttctaagtccaaaaagccctgaaaaccaaagacatctttacaggtttgtaggaaattgatttgagagcaaaacctgatgtgaacagatttgagagtattctaggcatcttgtataacacttcattcaatgctttgtgcctcttgctgcacagatattaacattcacttatgggccctgccccatcccctactggggatgctatgcaataatcagaataatcaaactaataataataataataattggaataatcactgagtcattgtattagtccgttttcacgctgctggtaaagacatacccaagactgggtcatttataaagaaaaagaggtttaatgtactcagttccacatggccggggaggcctcacaatcatggtagaaggcaaaaggcacatcttacatggcggcagacaagagagaaatgaaagccaagggaaaggggaaaccctgtataaaatcatcagatctcttgagacttattcactatcacaagaatggggaaaactgtccccatgattcaattatctcccactgggtccctcccacaacatgtgggaattataggagctacaatttaagatgacgttgggtgggaacacagccaaaccatatcagttatctttctaaagtgagacaaaaagtcagaattctgtaacacattttttcccaagcgtttccaaaaaaggttggctttaatggagtattagtttgctaggcctgccatggcaaagcactatgaactaggtggctaacaacagaaatttattttctatcagtgttggagtccagaagtctgaaattaagagtcagcaggattctgctgtctctgagccctatgggaatatcctttctggctcttctagtttgtgatgtttgccagcagcgttctctgttccttggcctgtaaatgacaatcttctcgttgtatcttcacatcgtctttcctctgtgcctgtttgtttctgtgtctacctttcccctgttcataagaacaccagtcatattggatcagggctcaacctaatgacctcatttctttccttttctttccttctttctttctttctttctttctttctttctttctttctttctttctttctttctttcttttcttttcttttcctttctttttttctttctttctctctctctttctttcttctttttctctctctttctttctttccttccttccccccttcctgcctccctccctcccttccttccttctttcttttaaaaatatttttcttttttttcccttccttcctccctcccttccccccttctccttccccttcctccctttcccccttcctccctccttctctccctccctccctccttccctccctcagggtcttgttctgtcatctaggctggagtacagtggcatgatcatggctcactgcagcctcagcctccctggcctaagcaatcctctcacctcagcctcttgagtagctgggaccatgggtgtttgccaccatgcctggctaagtttaaaaaaaaaaatcgtagagatagggtctcactatgttgcccaggctggctttgaactcctgagctcaagggatcctcctatctcagcctcccaaaggggcgagattacaggcatgagccactgtgcctggtgacctcatttgaacttgattacctctgtgaaaaccctgtttccagagaaggtcacattctgaaatactgggggaacatagttccccatcttataagatagagaatgggtcaagacgagcagctccattctttgtttgtgtttaggccagtgccaagttcaagatcttgcctcagggctttcctggtaccactgggaatgtgtatcagcagcagctgtgtcactgaatgggtgtcacctggggggctgcctgttcagacattagaagctgccacatcccctgttaactccatgtgagggaggaatcccttccctccgacaatttcgcctgtgagaatcaagtcagattttgcagtgagaactgagctgagtgtagaataagttcccgaggtacttctggcaccgttgttactcccccaccgagaagcccagaatgttcccaggtgtgttcaaagattgtacaggaagggcttaggacggtgcttggctcatataaacactcagtggcaaagaggttgatgcttaagtacacaggaagtgtttaccagtacacataattgtataccagtgagctccaccattcaatttactgtctgtccggtacattgaccctgtgaggcccactctcggtgtggcactgctaacaggttttattgttgcttactcacttgaaaagtgtctcccttggctagacctttgtcctgagcactggacacacataggtgctcagcagcgtccctctctgcaatgcaaaagggataccgtgtgcctctgcatgtcagctctagtcctggcatcccaggagcatacggtgacagtggaagtgaagcgcaagccgagtcctgggaaccaatgtctgccagaattaattaaaagtaagcatctttttttccctggttagttaatccaggatgaattccctgagtagttcctgccgttagaacttgctctcttttttagttagacacagctcggtgttgcctccactttgacatcacgttcatagttcctgtgcttggccagaactgttttcagttgcaaggacatgggtgagactggtcaaggaattgactttcagggttccaagggaataattagttcagaagtctgtccccatacttgttttccagtacaatctgtgtctctgtgggtgtttttttttaaggctgtgtgctttataaactggagatagaaggagccagtttattataaaaaggataaaatataattaaacaattaaaagtatgtctttatagccgggtgtggtggctcacatctgtagtcccagctacttgggaggctgaggcaggagaatcgcttgaacctgggaggcggaggctgcagtgaactgagattgtgccactgcactccagcctgggcgagagagtgagactccatctcaaaaataaataaaaattaaaataaaaataaacataggtctttggccaagtgtagtggctcccgcctgtaatcccagcagtttgggaggcagaggcaggaagatcgcctgaggctaggagtttgagaccaacctgggcaacatagtaacctcgtctctacaaaaaatttttaaaaattagccaggcatggtggtgtgtgtctgtagtcccagctactcaggaggctgaggtgggaggatcgcttgagcccaggaggtcgaggctgcagtaagccatgatcttgccactgcactccagcctgggtgacagagcgagaccctgtctcaaaaaaaaaagaaaaaaaaaattatgaagtactggttgggttaacgtttcttcttctaaccatgagggaagtaggtgggctgttctggtgactcagtgtcctcccagactcactcatgagaggaagtattcatggactgtggtgatcttgtcttggaatttttttctttgcctcctggcctcacagccgttccttttcttttacacatccatgaaagggagactctaagatcttccttgccaaggttgttgtagggatgagcgatgatgtctctgaggcaccaggcacggtgctggcacccagaagctgcttaatgatcctggaagttatgaccattgctcatagtttttcctacgtttcagatcatccttaaataattgtcattggctgggcgctgcggctcacgcctgtaatcccagcactttgggaggccaaggtggttggatcacctgaggtagggagttcaagactagcccgaccaacatggagaaaccccatctctactaaaaatacaatattagcccggcatggtggcgcatgactgtaatcccagctactcgggaggctgaggcaggagaatagcttgaacctgggaggcagaggctgcggtgagccaagatcatgccattgcactccaacctggacaccaatagcgaaactccgtctcaaataataataataataataataataacaacaataattgtcatttatcagcttcttcgagctcttaatatatatatcgccacctttcacaaaggcaaaatctgcattagaaacactgttgtctgattttggttcctctggaggaggggtagacagtctttttgtgggcagggtctgtgtctgtttacctctattccccgccccccactttggtgcccaccacagtcccttgtgtatggtggatgctccttgactatctgaggaataaaatcaattgtgaaacagtttccaaaaagggaacagtttttgtttccccgtttccttatagccttgtgagttgctatctctcttggctctattattaataacataaaagaaagagctgttttcttaacctctggtagttgcacatatatggggaaaaggcataagaaaatatgctggcaataaagacaagtcacagattgtcattttctttggtgactgaagggatatttcagtaatttataggtgaaattttcctttttgtgacttccactgaacaacatttttactaccaaaagataagggaacaaaattttttaacaaactatttaagcttaaatatttaaacatttttattagtcaccacatattaataaaatatttttattagcacatattttattagtcaacacatgtgtacacagctctgatgatctctatgtagatgcctatataaatagctatatagatatcatcagagctgtgtatatatgtgttagagatagatgcacatacagttgccccctggctcccaggggtctctgtgacccaaggttgggaccctcaagtgactagttatggatggcaaggggggctgcaaggccagagttggtcctggctagagatttcaagactcgagtggctgggaaggttttagaatgcaggtaaaccactagttgctccaaacaacaaaaccatcataatggaagcatccaaaagtgtgttcttcggcagcttcagagactatgcctaagcaataaagttttaatgtcttttttagctgcttaggtgaagaatgcatttgactgtaatctaacccattaatctcttatttttgctggaaaattgtacatatttaagagtagtggctcattgccagtattggtgatgagtgatatattttaaactatgcttcatacctttcagtaaatcttgggctgaaagatatgtacgttttgttttcaaaatttttcagtagtcatctatttaggtcaattttctgggcaaacaaaatatttgaagccctttagggtttgttattgagatgtaggctggccatgaaattacagggttcagtacctcattgaagtgtatatgtaactgttattagttttttgataacttttttatactcataaaagtagtacttgcttacagtagaaacttaataaaaaccataaatggaaaaataaaccattcgtaaacatcatatagagagaatgactattaacattttagcctaacatgattttaggggtttataatattctagtatatgattgtaccataatttatttaattgcttcccaattattggactggaagtttgcttctaattttttcttattatatatgatgctgtaatgagtaccttttaccagtaaatatttacctgcctctctgattacttctttgggattaatccttagaaataaatttgatgaatcaaagggcatcaaccctttgaatgcttctgatacttctgccatgttgtttcccagaaaagatataataattattccttccagtagtagagtattaaatgtctgcctctctttagaaagtattaccttttttcaatctttgacaatttgttagataaaaacttcagtttcaatattattgcatgtattcatggatatttttcttctcacacattctagattttttctatattgtttataaatgttttataagtgttattactttattgaggatagaaattattatgtaacacttgatggtaacagtaaaagtggaaaagaatgaggaaaccttcaacaaaacaagttgtcattaacaaaacgggttttgcaatgcaactttctgtgggttagctaaatctttagtgtgtcaggtagtcgaaagaaatttgctgtatagtgctgtgaaatatgctgcatccatgagccctctgctctttgcccatagggagcaaagacacaatctttttgcaagctgtcccagtgccatattgaccatcttccttttacagcaaaaagttattgcttcctttggttaaggttgggacacccctctggaggcacacttgaaaaatgaagacctttctcgttgttcttctgttatccaagtatcttggaagaacacctctatagcaggtagacaaggcagggtgtcattgcaatctggctgcagactgaatgtaatcccccttgacattttgccccttggaggcaactcctgccctcccctctccccttacgaccctgcccccttaaaatatgtggagctcagcaaagactatttattctgataaaaatgagcaaataataggtgtgaaagaacatggaacacttcagtgaatcaaatggagaggattaagcattaccccaataatgattggtcaggacgactgtccctgtggagtgtgtcccagaagggttgagcaatggagcaaacccagaaaatctcattctcaactctccctgacagatgacctcgtctgcgctgtcttttgcttcatggtgatgaaggtggaacaagacccttgaataagatttccatctctgaattctttaaacccatttgagatcagtgcaggcctgcagtctctctattagaactggagcagaggcccagaagagagaactgaattttcagcactggattctatgttgagaatgaaagagacaataattgaaaagcttttctcttggaaattttgcaaaatccgagtggatttttgaccaggatttcttggtgacctctcctgagagagcaggtgcctgaggatttcctgctgagtatcttggcatctgtcagactccttatgacttcattttagttcagggagtctgtttcctagccattgatttcatgcacaattcctggcatgtctcatatctctaaggtgatgtcacccttgtatttttttttcagatgtaatcttttatgtgacagtgaggtgtcttacttgtgagtgaacagctagaacctcccaagtggtttttcttttggattttgtttactcagtgaaaaatactgaggaacctgagatccttcagggtgcattttggtgtctgcccaaccttgacgtggatttggaggccaggctcaatgctcgaacttcttgttggagtggcactaaatcattaggatccctgaggacagacagttcaggccatcattatttggtaggcccttgcacacttacacacaaatgcatcattatgaacatggagcagaagattctagggccccgtgtgtaatggcacaatttgtcaagaggcctgagacctggagttggcatggattccctctcctcctgacccacctacctgctacattcagttggccaccctgttcttttgagtccacctttggatgagtagtcagtcctttctgatttttgccacctctgcattcagagctttcttattctttggcgcggaggccttccgttgggtcccactgcctgctgtcttatctccttctaatgaatatgatcatgatttttctgtatttagacaactccacgatgaggaggatgatggcggcagctaacatttatgtatgtatgtatgtatgtatgtatttagagacagattctctgtcacccaggtgcagtggtgcaatcttggctcactgcaacctccccctcctggattcaagtgattctcatgcctcagctccccgagtagctgggactacagatgcacaccaccacacccagctaatttttgtatttttagtagagacgagattttaccatgttgtccaggctggtccggaattcctgacctcaagtgatctgcccaccccggccttccaaagtgctgagattacaggcgcctgcctccacacccagccagcagctaacatttattaagtgctcactatactcctgccaagcactattataatttgtcttctaacaggctttttataagggaagtgctactattatacccattacatagatggtaaaactgaggcacagagaggctatgtaagtttcccaaagtcatgtactaattgatgaagacccagggtttgagctctgcaggaatggccgactccttgtggtttgagcctgggctccctctccatctgtcttttctccctgagccctcctgactgcagccatgccagactttttaatgttcggaaccccagctccagcctatcactggagctctgcctgtgatctttccacctcatgcctcccggttctatgtgtgccttcagactccatctggcagtggtatctggatggaccagtgcatagaaatcacatgagacactcaataaatgtagactcctagtgattctgactagcaggtctggggtggggccaggtacccagatttgcacgggaagtcagggaccactgctgctgactgcttttttcctgggtgcttggcacactctgtcacaatcatgttttcatttctctatgttccatttcaactggatagggacagtgtcttttgtttctggaacctgtctcttttcttggcatatagtaggcactcaggaaatagaaggttgcttgaatcctagtaccagtttactatctccttggaaagactgaaaggtagaatgtgatgtctaagcagcttcactaagcagagaaaacaaaaagtttgcaaaatagaatttgccttttaatctacatgttcttgcgtagcattgagcttcctagagagtcatattcatgctagccctgagttgtatcagcagcagccactagaacggtaacttgatgccaagagtgaattctgatgagcttcattgtgagtaagagtcccagtttgatcatctctacccagatcccgtgggacctccacactgtatgaataatgaggaggcgtggaatacgtagcatgctgcagttggccagcacccagtgtgtactgtgaggtaatcagtgtcaaatcagtcattgtagcaggagttgggagtcaaaaggagcaacagagaacctcacacgtctcctaagagaggaagcaaagaacagttaccttggctgtcatttatggggcatttgtattgtatgtttggaatggtgctgggtactagtattaatacatgattttctctggtctttgcaaaaactgcctgagttaggaattgtcattcccatttcattcatgagcaggctgaagttaagagtggttaagtaccagctgaaagggaggaggagcctgagagcaatctgggcacccgttttccccctcttcttatttatgaatgaatgaatgagacagggtctcactctgtccgggtctcactctgtcgcccatcctggagtgcagtggcacaatctcggttcgctgcagcctccacctcccaggctcaagcagtcctcccacctcaacctctgtggtggctgtgactacaggtgcatgccaccacacgcagctacattttttttgtatttttttgtagagatggggtttcgccatgttgcccaggctggtcttgaacccccgggctcaagcgatctgcctgcctcagcctcccaaatggttgggactacaggcgtgagccactgcgcctaaccctctcctcccctcgagcttacatcctactgtcctgtagccagctccaagatgttggcctttggttctctcttcaggctgaactctctttcagggagtttcctaatcgatcttccatagagttgatcataccttagtacctacctggatgagcactcaagatgttacatattcccacctgacttctttattactgctggaagatatggtgtcccacacctaagtatcccacccacagtccccagctgcatgtgtcgattattgtgagctattcaagggatacagactgaggtaaatgaaccaccagtggaagaatgtggatgttctattacaggaaatgcttagctctttattgcagttatataatagccggcaatcatgatagctgaggggcataaaaatgagagcaacagagtttatggtattctttataactgtggattctgtatgtgcgtgtgtgtgcacgtgtgttctgcatgcatctccacggcacattatctggaggtaacatgatcatcaggccttgagctcttttataagcaatagattgtggctggaaattgaaaatttagtttctgtagctagaaaatactcttttcaaatgccatctagaacagtagttctctgagtgtggttcctggatcaggagccttggtatcactgggaatgtgttaggaatgcagattcttgggttctaccccggattgaattcagatttgggagcggggcccagttatctgtgttttaatcaccccctcccccaggtgaatctgatatgctaaagcctgagcctcactcccctggaaagtgacgcctgattcatctgccagcccatgggcacccattaggaaggtgcttatgggagctttgacctgggctaggtgccggctcttgatccatctttttctaaggctgagggtgtccatagaaggagaagtaggtgcatccgcttagatgttatttaaccaaataaaggtttacagcttacagaaaagaggcaagattaactaataccttccaaaccataatgtaaaaaaaaaataaaaaatatttactcataatggagtataactgaacaaatcatgttgctaatttttttaggatatgttttgtagcttccattcagatacatcttatgggtaataaatacacacgtgaacacacatatgtgtactaacaatatttttcagacttttgattttttagatattgagtatagccttgttactaccaaacttttatcatacttccttgtgaaaggatttcatggcatatttattatttgaaatatcaaatagaaatcagtacagtctcagcattttaagatacttgatgtaatctttggaaatatcttagacattgcaaaataagggttaatagtcatagtatagccactaacgggcagttctgaaattacataaagttaatctgatgaactgatagcaatcagtttttggctatacataactagataagtgagaatttagagattgaatacatgagagccctttttatgattttcaggatctcaagtatgaagcaaaataaattcttctataccctaaattcttgcaaagtgatattttgattagatttgagctaccccagggctagcaatacttgaaagtgtgactagacttaacctcttagtagatagtccgcagtaatcctttgaaatatacatcttgctaaaagttcctttcccaaggaaataatgattaaagataatgtgatgtgtacaaggaattctgggacttgtagtcgagaaacctgaactttaatctagactactcaaatttataactttaggcaaatctctcttgactttctaggctttagttttctagggttttgttttgatttgtttttttatgtttttgtttttgtcttttttttggggggagggtgttgagacagagtcttgctctgtagcccaggctggagtgcagtagtgtgatcttggctcaccgcaacctctgtctctcaggttcaagcgattcttctgcctcagcctcctgagtagctgggattacaggcacctgccaccatgcccagctgatttttgtatttttagtagagacagggtttcaccaggttggccaggctggtcttgaactcctgacctcaggtgatccacctgcctctgcctctgaaagtgctgggattacaggtgtgagccacctcgcccagccttgatttggtttttaatctgtaaaatggtaggtgttgggtcacatgaacaatggctcttttacctccactaattacctagacgctagaaataagaatatggataagacctaaaccaaattttctagctaaattttgtaaagtctgaacaaaatctgtgtgcgttttaatctttcttgtaatcttttcagactctgcctttaaaattatatatatttttagcttctaagtaaacattattggcactggttttgataggaactttactccaagtgtattgacttagtagatatgttaaaaaggttattgcttagtttgtggaaataatacaagctgagactttaactgatatttgtattttcatttaggttccactgttttctcttttgaatgaaaagtataatcctattaaatctaaaatattttcttacagtgatccgtatgtgaaactttcattgtacgtagcggatgagaatagagaacttgctttggtccagacaaaaacaattaaaaaggtaggtgtcgatctttaaccaaatgtcatttaagtcataatttaatccaattatgcacagtcatgtgctgcttaacacctttttggtcaaggatggactacttacacagtgatagtcccgtgagattataatggagctgccatatacaagtgcatcactttttctcttttttttttttttttttttttttgagatggagtctcactctgtcgcccaggctggagtgcaatggcatgttctcagctcactgcaccctccgcctcctgggttcaagtgattctcctgcctcagcctcctgaatagcagggattacaggcacctgtcaccatgcctggctatttttttttttttttttttttttgtatttttagtagagacagggtttcaccatgttggccagactggccttgaactcctgacctcaggtgatccacctgtcgtggactcccaaagtgctgggattacaggtgtgagccaccgtgcccagcccactttttgtcttatatactggattttcattttaagtgtctttcagtattaaatctaaaagttttccaagacttttcagtactaacccaagatagtgattcaggtttttacttaaatgcctacaaaaacagtatcctgaaaatgtcataagttgtaacattttttcttgcacagaatacagcaaaaacaaggatttgtttttgtctttgtatgtttcacaaagaaacttaaagtaatttaaaatacatttaatgaaatggagctgtttgtggaattggtaggcacaccaggaatagtttaacttgaaacaactatttctaaaggaagcaaaatacttggttagctacatggaaatagagaaaatatattaataataaagctatacatgtatgtatatatcttattttcctaatttttatgtacatgatttcattaaaaatttgtttccataagtatgtcttttagttatttatttatttagtttgagatggagtgtcactctgtccacccaagctggagtgcagtggcataatctcagctcaccgcaacctttgcctcctgggttcaagtgattctcctgcctcagcttcctgagtagctgagattacaagtgtgcaccactatgcccagctaattattgtatttttagtagacgtgggattttgccatgttgaccaggctggtctggaactgctgacctcaggtgatccacccgccttagcctcccaaagtgctgggaatacagatgtgagccactgtgcctagccaataagtatgtcttaatttgcctatctccatgtatttatagacatatgtaatatatatatatgtaaatattttttaccctatgtttggaggctttattgaagatgcatgttctctattaaaaatacttggctgcatgtggtggctcatggctgtaattctagcactttggaggccgaggctggcagatcaattgagcccgggagattgaggttgcagtgagccataatgatgccactgcactccagcctgggtgacagaatgagaacctgtctcaaaaaaaacccaaaaaacaaaacaaacccctttcatctgtgctttagtatcatttatgggttactatgatttttttccttacctcctttagaggcgggtgcttagatagtctaacactttgctgaacattttctggacagcatgagtgctttaaaaaattgtaactgtcttgctgccatgcaggcacccaggatgcagccaggtccttttgtgtaaggaaccataactgcagcgtgtcctccacttggcattgggactggcattaaaaatctgttttgcaaacaggagccagtcttttgattagcagggaggatgcctgcgagggacggaggccattgttccctgtgttaggcgttgttgctggttcagtttctaggcgagtgggggctgtctagaaggctcaccaggaaggcagctgggaaacttggttgcctgctggatgtggagccaggaccaaagccggcgactggggctattgcaatggatttccttccaaagggaggtcctccttctccctccctttccacggtcgagggagtagctctgtagctgggtttgccctccttctcctgctgcccgcctcctggttcgtatgcctctgctgcgttcgggtgcgagaactgccgtcatcctcctctccttgccgtgttgtgactggttcttcgttcgttttgtgctctcctgtcttgttgctttcctcgcctgtcatttcccatgtgcatttccgtgaagctgccctccgggactgcagccagaggcaggccaggcctgctgctccactcccctcccctcgttcattaccatccttggcttcattcacatgggagaaaagtatgaaccccattatttaggattgaattcactgtggagttgtgggtggggaaagtgctgaatttttgaaaacgccggttcagtgttgtgtgagctctgtgtttcctatttttatgttgcactctgttgatttttttcatctccctgaactgatctattaaaggaaatagattgataaatatcattttgactaaaaatatctatcgctgttggtgaagtgatggtttttttttacatacaatttttaagagctgtctttaagaggcttatgcatgtgcagatgcatgaacacacatgtacagtcttccttcctagaacatgcttcctcttagttttgggggatatctggcagtcctttcttccatgctgaggacaaaggtatccttgccatctccttgtgagatgtacatttaagtagactgatagaaagatgaacagatggatgaatggagaggaagactgaaggataagtagacaagtattttttaacctggttatttttggagaaaaaaataattcacttttggcttacatttggtctttttttttcttgttataaaatctgatcctcagtatagctctctataaaatgttaagatttcaatatttatataaacaatgaacacattcaactttcccccacctgcttcgttactctgcaaaacagatttgtagcagggagagggaagtcaacaaagttcatttccttcttggtagaataatcatatcaatgctaatttcttgaagaaattttttatattttcacgatgactctttccaggcctttgatgtttttccttctggtgatagaagcagtttaaggtttcatacctatgaagcatctgtttcataaatacattccctccccctccagtttggtttgtacgctagtctcaaataatcgactaaatgcttctcttagctttttttaatcaaaaaaatgtttaagcaaatatgtagactgtattgtactagtaactgctaatgtttgaaagactaaaagatactacaagataatttctcttccagacactgaacccaaaatggaatgaagaattttatttcagggtaagtttttcattgtttggtaataattgttattgatacgtctaggtcgattatcacagtcaattcatcttgaggaaaagctcttaaatttttaatgagaaattccttttaggatgaaaaataggtagcctcctaatgtgtcccaaattttgaaagactagaagtagtggtcacagaatccggacttgtttcattggggagtgttttggagaagtcaaaagaaaattatccaaacaccatgtttcatcttttgaattcaaacctttctttaagaaataagataaaatatcatttatgagaatggtttaattctatgagacgggttatgaaatattttagagagagtaaaacagtagaggcaacatgattaaaaagaaacataaaaattaccagttatattctagttagggaggaaaattttggtaactgaaacacttgagtgcatatatatgtgtataatataaaattacttctggaatctaaatacaacagaattaggtaagatttcctcaaccttttatatttaatatttagaatagctatatgtcgaaatgactgaaatatgtgaattagcagagatttctgcttattgagcatttgtggttgttgctgtgttttactactgacattttggaactattagactgcttagctatttaattgaaagaaaggactttctcttcaaaacgaaggtatcttaattgtatagctgtgatattaaaaactgcttacctccagaaataatccaggtcttctgattagtgcagatttccaaaggccagtattgccatgaggcccattataattggtcctgatttcttcctctcaatcgcaatagtattttttgtgctccaaacttgggctactacatacagcatctgctttccattatgctcagagctgaaatatggcactgatactttcatacttggtgaaatcctatgtacagcctccaccagatgtatttgaaattaccctgtggaggactgaaaagctaataggagctgatagatgctgttggcctttagttaactctgaaatatagctttccacttgtgaacctccaaagtgtttagactcctttcagtggaacactggcacagttacataaatgttagtacatcccatacttttttcagctaatcttggcagtaggcacatttaagttctatttttgttagtttttctgaaggttttttttgtttgtttgttttgttttgttttgttttttgagatggagtctcactctgtcaccaggctggagtgcagtggcacaatcttagctcactgcaacctctgcctcccaggttcaagtgattctcctgcctcaacctcctgagtagctgggactataggcccgtaccaccacgcctggctaatttttgtatttttagtagagatgaggtttcaccatgttggccaggctggtctcactctcctgacctcgtgatctgcccgccttggcctcccaaagttctgggattacaggttcttaaggtctttatatttattcattttacaaatctttattgagtgcctattatgtgccagctcctgcctgtagcctgtggttgcattggtaagcagtgtgacccttcatagagcttctaaacagatagcaaaccccatctgcttgttctgtcgctaggctgcaggcagaccacggaccagaagcacaagctgagctctctgtgcttgtatggtcaagtgttatttcatgcattccccaccatgaagcagccagggcctaggtcacctctctgctttaccatttagagcctttgtgaccctggaaaggccacctgaggactctcaatctccctgggatccttatctctcacataggagagagaatccttacctgcaagggttgtttcaaggatttgcatgcgatgatgtaaatgagaacatgtagctctatgtcacacatgtggttggtgcttagtaaatgatacctgagtttggaagatgatatgggccattttggtgaggttttggtaaggaaaaggaagcaaaaagatatggaaagcccagtagctctgtcattgcctcacagttccaggtctctctcatggttcacagtctaggctctggagacaggcagcatagacctagtgcaggtcctggttgccctacacattagctgtgggctcttgggcaagttacttcactgaacctcagggtctcggctcctcatttataaaattgcgtgatagttatacatcataggattgctgtgaagattaaaggagatcatgggttgttgatatttaataacaagacagtgcctaaaaagtaagtgcacaggctgggcacagtggctcatgcctgtaatcccagcactttgagaggccaaggcatgcagatagcttgagcccaggagttcaaaaccagcctggggaacatggtgaaacctcatctctacaaaaaaatacaaaaattagccaggcatggtagtccaagctactcaggagagtgaggcaggaggatcaattgagcctgggaggttgaggctgcagtgagccatgatcatgccactgcagtccagcctgggcaacagaacaagaccgtctgtctctgtctgtctgtctgtgtgtttgtgtgtatgtgtgtgtgtgtgtctctctctacacacacacacacacagatacattcttaagctattacaatcttcttcattatttttatcattactattactgctatcaggactaagaaatatcctcaggcatagacattttttgatctacagtcatgagaatgccttgtacagaggttaggaacccgtcaaagctatttacaactatcctttcttattttagaaaaacagctaagagccttctcttcttttgctatgcctaaatttggggcagaataatatagaaatcagtaataggaaatttgatttagtacacatagaattcccagaacagcaggataattgttcatattatacaattgagttgggcgcattgtaaagcagtatgttattctttctgttccttacgtcgctgttcaaatgattcctgctcgtttaaaaaatactatttatgttccttataggtaaacccatctaatcacagactcctatttgaagtatttgacgaaaatagactggtaagtggatgcctgtatttgaattttgcttcatttttttattaactggattttcagagcagcgtctttaaaactctgtgtttatgttgtacttaggacagtatatgtgcccaaaaagaagactgtttttgtcccactacgagtttgatgttcaaaatcctaacaaatagttttatgttgctaggataaaaaatgtatttgtatgtgtgtgtatttttattgcagttaatgttaacgaaagccactggtgatagtaccagcccatatgctcatgctctaatgttgggaatacagaacggtaggcagatctctaaagaggccatcaggaatgtaaacaaactttgctcggtttttaaatgaaagccagaccatagtactgggatgcattcagtagcaaatctatggtaattctctcagggaaaataacaatctaattaacaacgtatagcaaaaagtgaatctacatttagcaggtaaagtcaagccgtattttaaaagtggttgccttcttaagagagaaccttagaaagtacctttaaagaaacaaagatatgcctgaggcatataacagatacaaactaacattttatatatagattgatgtatatataatatgtttatgaagatcgacacatacataactgaaataattatgatttcattttattgtttttaattttttttagagagagggtctccctctgtcacccaggttggagtgcagtggtgcagtcgtagctcactgtaacctcaaacccttgggctcaagcaggactccaggatagctaggactacaggcatgagccaccatgcctggccagatttcattttagaaatggaatttttgaagcacattttgctttcttaactatctaaaacgtgtacatcaagtagctgtgaaccaggtgttccaactatgaaaatgaacactatcatgttaagtccttaaggtaccttcagaagtgacactataattcagtgcagtcattctcaaatttaccctctctgaaacttgtatggtatgttgactggttaaaaggtgttcttaagaatcctttctgcagtattcaattgaaactccagatttttaatagctggacgttaatagaatatttgaattggaggagccttatacaataactcatttaactcctgttgttgtcgatgagaagaaccaggtctagagcctttacataaacacatcagtcagtggaggtgccagggtctgacctgctggcctcctaagtcccagcccagtgatagtttgggaatgtattgaatctcatatgattagtattattctccaaaagagaaaactaacagattttggcctaccatcctagtatcttttccattaaagtatgggatgttgggtgatgaacagtcgtacagtgtaactaaaccacttttgttgtatgcatcaaagtactttcttgtgaaattggatgagagattctgctgagggtgcagttcttgtctctccatctctcatccagtgaggaccaagtgagttaagcagtattgagtagtataacagtacgttcctggagacatgggtgtgtctgtagactaatccttattctccaattattgagtataatatctcttgtttaacatgaggaaagggtcaaatttgaggaaaaatggcctcttgtttgatgtgttttagttcattattctcttctattaagagaaattcactgttaaaaaattgtttcccatttccgtatctgaaataatgactgtagttgaggtgatcttgccctgggtctgaaatcatacttccaaaccaaaaaggactttgaatacaaaacttttaagaaatcttgtatgaatacaagctatatctgaaaaattgtgttttataatattgatgcctagttttgccccaggccatctgcagtgtggttactatgcaaagaatgctggtgttgctgtttttttttttttctttgttggctattaacccagcggagacaatatgtggctatggtagtacttggaagttctagcattacacagactagcttccatttctctcatagaggtcatttttggcatttaaaacacatacttttagaaaacagatttggatgtatgtaaacacagggttaatccaccacactctggatgctagagctgttgacaaagtcatgctttgcagattttaaaataaactttttgttactcttacagcttggtattttcccctcctattttttttacctcctctaaataaacctctttgttaaataattgatgtttctggatcatagaaaatagtaagtttaaaatacagaatatttccaagctaactacaaatctgatgacagttttttgagtgtgcacttttccttttatttcttaggtcctttttggtcctttgcaaacatagtaagattccatatttgtgtcccaactgtggtaatattgctgacttcttactggaaaacagtcagctctaggtagcatttcttctgtgtggtatttaagttaaattattaccaaaaaaaaaaaaaaaagcccacatgcactcccttcttcaattttccttttgttttttgttgtttgtttgttttttggttgatgttttctttcctacctgacatatggaagacaatgttttctccagctgggttcattttctctttgaaaaggagacactttggtgtctgccagtcatatgtgagctacacacacgtatacaccttttaaatgaaaaatgctgtgatagcaggagggctctgcttggctaactggttgtgtagcaagtcgggccccctcccctccacttagctattttgttacttgtagatcctgctctaattatttagcattaaacggacactaactctgtagggtgtgtaatcgtatttatagtactgttttattagtttgcattccatcctggtagtgtagtgatgtcataaataacagaaacatggtatccgatgcttgggaaggggtttacccggtggccaagccatattttacttgtcattattccgtgtggcggaaggtgggaaaataccgtgtgtgctgttaaacatgccaggtccctgcactggttagacagagtctcagtgctgtgctccgttgggaaagaagtgccctgcgaatgtgatgtggtttagatttatagcagcgtggcttgcagtgtgtttgctgccttagtcagctgtgagagcgccctgctggggccactcctttctgatggaaaagcagcagctgggaaggtgctgtttcaggctcttgctgtttaaaaaaaaaaaaaaagagcgagtaggggaaaactcctctaagtccagaagctggcattggagggggagagcgcggtcatgtggttctggccaccctaccctctgtcacagtgtggatgagagctttttgctcttatccaatcatgcctggaatgccgcttgccacttgggttatttctgctatctgtcgctcccggtgccgcagtgctaacagtttggcagatgggacactttttcttggaatttgtgtctttggtttgtgacttctggcagtgtcgggcctgttgttgccgcttgccctagccctcctggcccccctggtcaccatggcccatcggcttcggtttcattttggctctggtcgcagcaacacagcccccgaatcagacatcctagaccaggagagagaagacgacttcttcatggcattccacaccctaccgcggagaagcagcccgcaccccttcgcccagaacggaggggaggacggcggcggaggcctgcagggaggcgtgggtgcgcttaagcggagctcgtccatgttcatcccgcagctcttgaccagcatcgacgcccgccccacgtgcagctcctccgtgcagatctccctgcagcgcaaggccacggacggggccacggacgggtgcgggccgcccgagggcgccgacgatgggcctccatgcgcaacgcccgaccccagggaccaggcctccgccactgccaccacgagggcctcgccccagagtggctcccgggagccctcgccgagggacacccccgggagctcccctccgagggcagcccgggacccagggctccaggtcaacggcacgtgcggccgccgcgtgcggtgctccggccccgtggactgcgcggaggaggctgccccgggcctgcgcatccagcaccgcgcctccagcgccgacgtgcgccaggtgaggctgctgcccctgggccccgatggccagggcggcccggccgcggcagagcccaggcgctggtccctgcagcacgttccagatgcttctggaagctctgggaagcggtgttttgtcttccagttgcagcagccccaacaaggcgcttcggggccaggcagcgacctcaactttggcttcacgggcacaaagggggacaggttggtgaggtatcctcgcattcggctggagaggagcacctcgtaccccacgcagccccgaagcgagcgagggagccccacggaagatcggggagccctggaggcatcgcctcgagctggcaggatggctcctgaaatccgcaggacgaactccgcggagaggactccgcagggccaggggtgcacatttaagatcaggcaggatcagaacgcggggcagcagcattttagaattcttgtaacccgggggccggaagaagctccccagaatcccgaggagaaaagcgccaaaagccctgtttccacgggagctgacaccacggtaagttcacagcgtgtttacatgtgtttactgatttcaacttcgatgcttactctgcggcgtaaccaaaataaaacctcaccctctgttccgggagtttccctgcttcaggccagtggatctgaatgtttggccgagttctggcacgatgatttgtggtccagtgtttggtgcgcaaaacaccatttctgcaaatgtcttctgtaggtcctcaaagtcaaagaactttgtctgtttgggaaatccaagcagaataccttccccctgcttttatttttctgaatagaagaatttcgaataaaatttgttactttaatctgccaaaaaacaagtcagtgccccaacgtgctgatgttggaattgcatttaaaaagctgcttgcaagtatagcctgtgacaatactttaaaaataatcagttctcggaaaggggaggatattgcaaaggacctcagtttcgtctcttaatagttaaaataggtgaacgtaaagtttagtggaatttgattatctgtcatggcctgtttgctgcaggaggtcaggtcagtcgttgttatataatttgctttgttttttgtcccattaagtaatactgaacgagagtagtgtcgcttgtgggatagtgacattactatcccacaagtgacactgctaagatactaacagatgcgtttttaaagcacattgggttatggcccaaggctaggggaaactgatggggactcgttaatggtcagatggcgtggcgtgcaatttaacactgcacacttgagtgtccaagccgaggatgctgtatatagaatagtaagtaccctgtctccagctgtggagaaatagacgccttagaacagattctggccttcctgtttctctgttcctgatcgctccctttcagtgaaatggagtacagagagacagctgcacgctccatcgaccaggcatatgatgactctgcagctttcgtggtttagagtggaatgaaaagtttaatcagtttggtttcttttactagtaatcactagccagtgagtgctttctcctaaagaacaagctccttatattttgaattggatattttttctcctgaatttcatgtgactgccagtttgaggatatgattagtaaatgtctaggggacttttctttggatttcacttatgaattgtgattttgaaaagtgagcgtctgagtattactctagaattgtattgtcttttattgctttgtgttcagaaataagtttcgtctttcaagtaaactttatcactcctccatcattggttttcatcattttgaagatacaatcagatgcttaatgaaaatttatttttcttcttctctttccttccatgtatctcctttctttcattatctcaaactcttctattgggaaatggctaagtgctttgtcttggtctgaacctataccatgtattacacaatggtacaaattttgacagtgttttgatattatagtagcctttaacgcccacccccaacaaattaccatcatgacagttgtaggctttgttcggcaacacaattccatgctgaacttggaccacttaccgcatgaagattgacaaaaatatatttcctaaagtttgataactattcaattatattaccaaaaactgaaatcactttgcagttctgatgtggaagacaaagggattcatacaattaaactcaaaaaagttcaaactcatttggtttgaactttcaaatgtaattagaaaacaaatcgaataaactaaaacttatgtgtaccttgcttaaaagggctattctaacttgcaaggcctatgtagtgaaaaacaagtttctacacatttggagaatataaattctggaataaagagcttttcttggagagtaagttccaactagtgaacagtagtttgcattttcatatgtatgtatttttgtacacatacataaattagtacgtggttagtaagctggttttcttttaagcaaaacgatttttctttaaaaaacaaaaccaaaagtggtcacataacaaaaccgcctgctccattcagcaactttgtatgcatttcatatggacaggggtgttaagtttaggcagcagctgccaccgccttacttatcttgaaggaaaacattcacttgggcgtctacagtctggctgctaccaagcttttttggcgtttcaaatatccactgctttggtctaaaggacattacattattaagtttacatgaaaaattagctagaatctgttgcagtttggtggtggaatgatacggaaagtcttcctagatttgggaataccgctcgggattcatttgacaacgtgctcatatttcataagctatactttagaccttattacaagattaagttgttgagtacttttatctgtgcctcccaaacatcctgccatgactaaatctaaaatgtaacatgactccaaaaaatgttaaccaactaaattattagaaaaaatacaggggaaacccttgtgatgataagttttccacctggtttatcactgtcagtagacaagaattcattcgtatagtcatcaattataatcagttaaaaattttcagaattgttagaatttaccaattcagtctgtggcagtcattagtagtcatttagtgagtaatttagttattttcttataaattagcttttgggttattgggttctgagcctcttaactgcattagagttattctgaggaagttggaccaccatttaccagcatttgtgccccctttgtatgccattttgtgcataataactgtgaaactctgcattttacaagcttgaggagccagttttctaatctcattggtgttatgaagtactcaaggtctactgtgtatataacattacacccgttacttggaaagtttcagggactatctcagtgtcttgctgacacagtttgtaatgtaaacggagggaggagggcccacccggacaaaagcagtaattctaacacctactgcatatgctattggagaagagagcgttctttcagctcaagctctctggactttcctctgtgtcctctcagtggacatgtacttcacaggagtagtgtagtaatctcttgtgattaaaaattacttttattgaacaacaaaggaatatccaaattcttttcatttggggaaactttgagtctcttttacagaagatgtttttaatatacggccattttttgacattaatattagtcgatgtctgttttttaccctaaaaataactcgagtatccaatgtattaaccacccctttattttaaaacataacaacacaggaggcgaaggtgggaggattgcttgagcccagtagtttgagattactgtttctaccactgctctacagcctgggcagcagaacgagactttgtctcaaaaaaataaaaataaaacttaatattgtaatggagaagaaaaacaagtagcattcttttcattgacctggtttctgactggattcaatcaactttctttcttctctcatgtatagtaatgctctctcttaatgtggtcttagaataaaccaatatatatcttcaaatgtcacctgttttcagggatgttttgaaaagttggataggcagtgcacaaggttgacaccgatatgtttgtaaacagaaactgtacatggcttgcagcatagctcatgtttctgtagcacttcacaatttgaagaatgctttgtttatttcacttaatatgtatggctgtcccattgtggaggcattatctcacttgaccctcccatgtgaaatggtgttatttcactgtttcagatgaaaggatgtgataccgttgttaggtgtaataacattatgtgtatatcatagtgtatactatgataccactttgtgcacctataatgggaatgtgtatttatgtgtgtgtgtatatttgcacaattaaaaagtatatgttaagccaaaaagcagtttaatgcttcctgtgatgtgacagtttttttgaaaagtttagaggtggtaacttcatttggtgtcttgcagcactggcctgaaggtgagagaaggcttctttggggatccaaagagccgtcctctgcagttcactagcttttggtcctggagtacttagactccctctctaagcctattcctcatcagtaaatttgaggataaaaatgtccagctcgtaggttcatagttaggtttaaatgaaagtgtccatggaagtacctgattcgtgaaccaggtatctgtaatatacaagtctttcccctagcaggttaattaggttaattgtgaacaaccattttttgatcagtatggcatttaacacaaggacaacatgcatttatggcatacctggaaatgtttaataaatagctttgatgctctttctgttgtcatctcatctttcctaagtatttgtccctaacaccaaatacagtcttggaaaagaattgcttcctgaactatgcattatagaaaaggactcgtaagtatatttactgtgttgattttgaagccttataacattttggcttgcatttctagcatattttttaccatgtcattttgctgtaatatttccagtggttgagtctactgttactttggtatagactgaggcttttgagaaacaatatagtgttatatctacaaaatttccacattgtatgactttaaaatgagggagatatttgggaatatgtcttattttaagatactgtcttttagagagttttcataaatggtgcagctgcttctcttggctaagcctggtggcagaattcctagtcattgaaataaatctctaattttataatacatactgataagaaacttgctatcttttcataaaagttcacagtaccagaataaatttactttatgtaaaaactaccttaaaatgtaataaatgttggatagttgaatggtttctggatagttgatgaatatttctgtatagttgaggcgaatctaaatggtaatgctacttgtgcaactgtcaatgatctagcacattttttaataaaaataattacctgcatattactgtgggcgatacaggttagctatcctaaatacgtttttacctttttaactcttaattatattaagccatttgcaagaatgggaaaaagcaggaaattcataggtggtgttgaaattgctgattctacacaaaggtaccagaatgtctacatttcctctgtaaatgtcaaaggaaactttggaaacccacctcagagttggctggtgattattcggacaggttatcatcctgtctgcaaccttctagttctcttagttcataccaagcagcatgatattccatgtcctgcacaaaggagagcaccaaaacagccttcacctgctgcgtatgccccactctgaataaaaaattaagaaggccaaaggacggaatgtgttaaatattagcaaaagcaggtattgcagaatgtctatacatttctgggcaggtggagattattgaaagatttttagaaataatcttcgttcaccacattccagtgccaggccctggacttctgtctctatttgtgataaaatgtttttaagaaatgctggctgggcacggaggctcatgtctgtaatcccagcacttccagaggctgaggcaggtagatcccttgagcccaggacttcgagaccagcctgagcaacatggcgaagcctcatctctacaaaaaatacaaaagctagccaggcgtggtggcctctgtctgtagtcccagcttcttgagaggctgaggtgggaggatctcttgaacccgggaggcggaggttgcagtgagctgagatcgtgccactgcactccagcctgggcgacagagtgaaactctgtctcaggaaaaaaaaaaaaaaaggaaaagaaataatcttctctcagtgagcatgttgaatgcataatgttctcactggagttctcctttggaatctcttgattattctgctgtggcttccttgggccaactaggatacagaggagaataaatgagtaactcagtgagacaggtggcctgatgtgagtgggcctgaaagttagcccctgatgtcctggctggtttcatgccatgtcctaaacgggcactttcctggtctctaggcatcaccatgttttgacaggaagcttagtttctttcaggatggaggatggaatcaattgtatttcaagaagcctgttttttatgccctgacaattttagaactgtggactgttctgacacttttgagtacagtgattaaatctctgtgaagggacaggtcatgaaatcaaataaaaggacggatcataattgagctggaagggggccctcctatctctgatttgactcgttgctacactttagtattcggaaactttgtattggttcccttaagtgcctgcacaacctccctatttctggaaaccattcagtgtttgttttaatgttaagcattatgccacgtatccagtaagcagagcagagtaaattcctccaggtagcaagagactggaatttcccccaggcagatcagcttttcacaggttcctagagtttacacagccttcttttgtgacttaatttttgtagatcacagtgagtcaagtgacttttacttccctgtataataactttgaggagcctacttgcaacccacatcatcactcattatcttgcttacttctttcttgggggttagatgggctggggttgttattaagcatgttaaatactttgaaattcaaatcgtttctgatagatttagtttctctttcttctattggtcattcgagagctggtagacttttaaaatacatttaatgactcacacatgtcataactcatccatttccttgacattttcaagcgtgataataaatcctacttcttaggcttttttttttttttttttctctctctcatgttcttttcaaatgcatggctaggtagttacctcatgaaggaaaacaactgttttggtccagattttaaaaattgagttgaatagaaaaggtggggtggaaccagcaatactgaaatgtaataatgtatattaagctccaaccaaacaatccagcacttcttcaaatccaggaggtcttctggctaggagttacattgcagaactaacatggactcttaaactttgtaaggaattagtcacagttgaacactggaaactatcagcatacctctgggcttcttttatatggtcttcctcatgagttaaaatgccttaagcatagtatctgttccataggaccttactgattatgcttttccacttgaataaaagagatattaagttgtaataaaactttaaatattttaatttagtttgaatatttaagttgaattaacctcttactacagtaattatcttttttgctaacttcttactacggtaattatctgcttttataaaatccagaaacgatgttatacacattagcacgcattattaggtgcccaaatgccaaggctaaggacacagcaatgctaaggacacagtgtgcctccggcctgcttgcaccctcggttgaaattatattagcaagagaagctcctgcattctgcagtatggcatttttctccagctaatgtatgcaggggtcatttttaaatgttagattcacagatttgcagagctgtgagttgccttggaaattatgctggccagttcctttaattttaaagatgaggaaagtgagaactttcctttttaaaaattgatacataatagttgtacctgtttatgggggtacatgtgatatcttgtacctgtttatgggggtacatgtgatatcttgttaacatgcatacagtgtgtaatgatcaaatcattacatactgaaatatttgaaatatctgtcactgcagacatttgtggcatctgtgtgttaagaacatcccaaatcttgtcttctggctgttttgaaatgtatagtaacttcttattaactgtcgtgctgaggacatggactactgtgctgttgaacactagaacttactccttcatctgaccgtattttcgtacccatttaccaaccctgagagctttacttttgcagtaatagagaatattctttttctctcttgagtatgaaataattatttttgaataatcactgcacgtgaagccctatccttcttgacgttggacatataaatacttagggagcttggtttatagagctttcagtttcacaaacagatgggacagctgaggtgaggcctgcctagcagaagaagccttactcctgatagcaggcactaagcaaggcattgggtgacagattgcttatgcacaggctgggagggacaggaactgtgtcatggaggggcaagactggaactagatgctgaaaagtgaccagatttgtctcagtgggccagtgggaggggcctcattgaaagactgaaggtagatgtgcctcccagggatgtggtggtcatattggctccaaattgccttgttcattattagcaggtttcagcaaattatttttcatgtgaaacgttgctgaagatttcttgggtgtggctgtcatcacaaacaattcctctcttttccatcaaatgtggagttggatgaattccttccttgctggcctgccttccacaaagctgctctctgaacacctgccaggccatgctgaggacaaggaaataccaaggcacagtttctgccatttaatggtggtagcagagacccaggaatgcaatggattattgtcactttcattataacatcatagtgtaggatcataactggaacagagaggatgaagctttcttttggggaattgagggagggagacagggtcttgctctgttgcccaggctggagtacggtggcgttaagatggctcactgccacctccacctcccaggctcaagtgatcctcccacctcagactcccaagtagctggaccacaggtacatgtcaacacacgcagctaattttttagtttttgtagagatgggggtcttactatgttgcccaggctggtctcaaacccctggcctcaagcagtcctcctgccttggcctcccaaagtgctgggtttacaggcatgagacactgtatccaactaagtaggctttatttatggagtttataaagaaactgtttatatatacaggggagaatttatcctgaagaaaaactaaagaaatgaatattttaaatacgtctctgcatttctttttgttggatatgacatttatgtaagaaaaatgctaatctgtatgatatgagacatgttaactacatatggtacatgtatttaaatatcatatgtatttagatttagcaacaaaaagggaaatataaaccatatttccaccatttgaacaaatcgtattcaattatatgtgcatataaccatttgaaaaaattataatgttgatcggatctgcaacctaaaccaagtgccaaattaaattcaggatagataatttcatataaaatgtttcacatcatagaaaaagcagtgaaaattgagtatcagatctgtgaaggatgatacatttctaaccttagaagcagaaaaggaaatcacagaagttggatagattcagccatataaaagtattaaatttctgaaccatgaaaaaaataactaaaatgagggaaacaccagatgtttttcttagtgattcatgtaagttctcatatgtatatcttttcagtgtctaattatgtgcatattttggccagtgggtttgtatctctgtagaaagttctagtaaatactggagaaatactgaggttcccccactccagctctttcactccattgcaaagtaggtcttgtaggtgaatcacacaaacggattaacaagaaagacagaaatgtccagctcccaggttcttcattatgctgttgtgttgtgccaatagaaaatacaatatatcaaattggagaacttgtggttgaaaataatatacgcagattgctggtggcagtattcatggatgtgactttggagtgatttttaaacacttaagtatttttaaatgataagaccaattataggtactaagagtcttgtgttttgaagtgttggagttaatccagataaagttacaaatctaagcagacaccttattaagagatcattattctctgcttttaaagtggacttgctttctatatagttatgaagaacagatagaaatgttttaagattactggctactattaaaataatctggtgactgcagttatatctgggtctaaggcattagactttttggaaaatggatgcttttaatctttccttccgtatatttgtcacccagaattttaaaatttggaaatttcattcattcagtccagatagagaattgatcaattggcaattttattatttttcgctcatgaaaaactctagggttacaagaatatgctcctgaagttaacatagttacttttaaaatgtctcaattctaatggttaggtattagtcctctgagttccggttgccccttaacttggatcttaatttacagtttacagaaaattgttcatatttcatattttaagatcatgtactctaaaaccctattatacttgaaatgaagacctgttatgttatactagaatctctcatgaaaatgtaacagttcccaaggaactttgtttctgtctccatggaccacactggctactgtactggatggagggcaaggcgggagctgagaggcctttgcagaagtgcatgtcgccttagtatgtggcagatcctggtccctggcctgtgctgtttccctccacaccctttgatttctccgaataccaggaaagatcatggattgtctcgggagttagtctcccccttagtacttagcctgtcattttcatgttgcaatgcctagaaaatgggaggtttttcttctccttaaggaagtgttatttcaagatgctttctgctgcctgtgtcatgccagggcgtgggtggatatatttttgcacttttgcaccagcgagtctgcttctgatttgcagattgcatttattataaggcgtattgtccattgatgaataatgtgtgggcattaaagcaaagctgatacatagcttttaaaatagctcatttatcctgcaagcttcacccccatagagaggcaggcccttcagaagcgttttccaggagcaaggtttctgcatgtttccctcagttttggaggtcgtcgttttttgcccctactgtgggggccaagggaaaattgctctgcgccttctgatggtcccctgaaaaatcaactgtcaaaagcccaattaataggagaaatgccatacaactttattaacgtgcatgcagattgattaccccaaccccccaatggggttcagaagcttctataccatcctgaggttataggaagaatggggctcagagcccgaccaaaaacagggtatggtggtcaatcaggttatggtggcaagaaagattcttggagggagagaagaggaggcctggctagcagaggtggccctgtcgtgtagatgaaacctcctaggtagcagccctcacagagaaggcagatgtttctttcagacctttaaagatgtcagactctcagtcaatcttccctagatctggacaagggagggccttagagaaagatggcctcccatcagtgcagtttcctccccaggtgcaaatctccccccacagacctgccctctgaacagccattcacagtgtatcaaagaggtatattttggggtgaaatatttttattcccttcacccctagtttatcatgtgtttccttgatgggctgagggcttgacagatgagcagatagacacaatcttagttcatggaaaaggcaagaatagagatgggtagcggagagtttttaagttgctgctgatgaaatagacactcctttgtctcagctactgaaaattttctttagaacgtggatttaaataaagaaagaaatagacatcatgctttgtaatgaagtcctttggtcatcgtaagtggtcacagccagtttatcctcaggcttctttaagctgaccagttaaggtttctgcagaggttctgtgtttgagggaggagaggaagtccttggggaggaggggagcgttctatgggagacagtgctcttgggagcattctttcaatctgatacccatgcaagggtgatgacaaggtatggccttcagtgactcagagcctcctcccttcccaagcctcaggcctgaaagtctggtgatcctccctggcagaaacctcactggggatcattttttccttttgaacaagtttcttactttgcctcatatgttccaatcttctgtcagtggccaggtgacatctgttggaatgctgatgtgtgttgccaagcaaaacagatgcaggaagacttgcccaaagtgggggaagagagggaggaaagggaggaaaagtgggaggtagagtgtgttagctggggagatgggatcgagcagtatttatctatagaacagatatcaaagattgggtaaatcatggcttaaaactctcagaaaagcattctaggttcttgcacatctttgcaaggctactgaatggctcatttttatttcccaccctgcattcagagtggtgtttaaatggctcaccgcagcaaaaaggattaggtattacccttgtgctcaacacaagtctgtggtcagcagatttttaactttatcctagtttattgatatttctgtcagtgaacaggtttaactcttaatggaatagaatctaccaagaataatgcagactggataaaaagaatttcactgattttgattatttagcacattaaaggggacccctggccagaagtagatgtattgcttgggagaggagggcatagtacccaggtggtacttcagggattctgattttcagtcagggttgagaaaaactgatttaagaagttaatgctactgacagcctaaatctgggtttccttgataacctttggtgtaaatactgatttaatgcatttttttttctcacccacttttccttcatcaccccaaatctatattgtgttcacatggttcctctttctagaggtgggagatgtccttttatggctcagaggtccacaaaataaacttgcattcaagcaaggttgtaaaatacctatgcattaagagcagtccagttgaatatttgcaaagcatatataaaagagcttctctcctaaaataactgaaatgaaaggattaattttctctcagtttcctactgcaagaagtaagtaaaagtggaattccaattctagccatggcaagaccggtctatcctgttatgtcttgtgtgccaataccacttttctccaggtaactaaagtatctccctgctgtaaatattaactgagtgcatttttgtggcttttgataactccacgtcttgaaagtgttggccagttgtcaaattttcatgaatttcagagaagtgggtaataggtggtttctctcacggtatttaaagcgaagtagtaaagaggaaaaagactgaaaaggtaacctgggtcaactcattttttagggcgcacagaagtgtggtagcggagcctggacatcaggtggcctgaagcccaaaccaccagctcccccagcacaggagagtgcaaactgtagctcagtcttggccatctggggtcttctgcaaatgaactgcccatagtctggccaataattcacactgttgtattgctgtctttcattctctcttaagtagagcgttctgaacatatctgaacaattttttgacacgctgttactctcctagccacaggttattttatgacctagtcattctttacataaataaacatttatcaacagtgctgtctgggcctagtaaggtatatagcctgctttgtttctgcattaaagttcttagaccgccatgatcttgagatgtttgctgcttattgtttctttctgatttctattgcttatcagttactactacttgtggctccaaggatagaggccgattccctcttctaatttgctgcctctcatctgcttgaagtttaggtgtttagtcaagctcactagcattgtttataaaggaagaataaataggttgagagtgaggacttagggtagttacctttttaataatgtatatgatctgtctttggtctttctccctcatatctctgctgattttactctcgtcctcctggaacgtctctggaatcagatagatttttgtaagatttggatgtaagaattcagtggaataatatatactagctgtttagcctagtgctcggcacatattaatgcttaataaatattagctcttattattattgtttttttccctgaaagagaaaatcttaattcctcacagatgtttaggaattggatatgtagcaaccctatccactgaattagtatcagcaaacacatttttagttcatcttgatttttatcttcattgggattatgcctttatccctttagggttaatgaatttcctactgtgctgttatggaagaaccctgaaaaaaaaatcaataaaatgtatccttaaaaaagattttatgattcacttgactaccaggtgtcagcaacttttatttttattactttaagttagaaggactttgaaggttttcgtggtttattctcttcttttttaaaggccaaaccaagatcactttttggtaatggctacctttcctctgaatgtatttctcaaaaagttctttctggtttttattaaacccaaacagttgttataatttaaaagttacccttttagagtgagattagctagaaaagaaattaaggattattttaagtaactcagcaagtaaccttttccaagaagcttagattataaattaacgaaaaccaaattataaaccaaggtgtatggttgattgtgggttaagaattttatcagcagttttgctgttgtatgtaccagtcgtatattttactactgagtagaagaaaagtctaaaaatcaagtgagtagtttttccttagctggttatcatgtttgtttgatcattatattaaagtgctccttttatttttcgttttgtatgttttcccaacttaataatgaatgtgcttctctctaatctaatctctgaatttcaggagtctattaataaagtatgtgtaaagaattagttgctaattttggatgtggctgaaatgagattgtcagcaaattacaacttcaagcctaggactgcagtgttatggattgcacctcatccttggttattgaagatatattcaaaatttatgaaaaatagaaaaaccttattacttctgaatttttccacgttagactttccttatacttttaagatagtgaaagtgttattatataagatcatggaaagtttgtctttccagacctattttatgttaggattttacaatattaaattcataagataatagtagagactagaaaacaaatccttactgataatgaatttcctaagtagtaaatacaaatgaatatttatttgtaaacctgggtgattaagtaatagctgttcagtgatattgatggaaggaaattaatattatttaatccaaaggccaggcgtagtgactcacacctgtaatcccagcgctttgagaggccgaggcagatagatcgtttaagctcaggaattcaagaccagtctgggcaacatggcaaaaccttgtctctccaaaaaaatgcacaaattggccggtatgtgcctgtagtcccagctattcgggaggtaggaggtaggaggatcacctgagcttggggaaactgaggctgctgtgagctgtgattacaccactatactccagcctgggtgacagagcgagaccctgtctcaaagaaaaaaaaaaaaaattaatcccgaccttcctccaaaaaagaataaattaagtccagaaagtttggtgattcacttgctgttgccgcctttataaacataaaagtcagtaaggctaagggacacttctgaattccttctgctgtccaggtactgtgccgagttctagagatgcaagtagtacataagacagatgtggcccctgcccttgtggagactgcagaccatggctctttttcatgaatggtagagacactcataagtcaaatacctacatattttcatgaatgtgccaaaggaggcaaacaggaagctgagacaggaaatcatggggaggcctacttgaagagaggtaaggaaacccccaactcaggagtggcctgtaagctgaggcctgggaaggacccctgtgggcatggccagtggaactgcagcggaagcagccgttcgcccaaaggtcctgcgctgggaagagagtcagagatgctggaggatcagaaagggatcatccaagtgagtggaggagacagtggtccaggatgagcttaggggaaaacaggggcccctggattgttcacgctgtagaacacagtcatgcatctgatatataaatagcatggagataccctcagtagatgcaaaactcaaatgagctcagctgctctgaagcctgggaaaagtcagcaatttgtaaaattatgacacatccacattttcacaggaaaaacaaagactagtatgtaacatctcctttggtatttacagaggatctctctctctctcgttgttactcttacaaatgataggaggccacttttgttttccaaattctgtgccagatatcttgcctttcctgagatatagacacggtagagtcaggagtgtgtgtgagggcttgcagacttctttttatgtctttagaatccttcttcacttttgaatcatttggtccaggagtttaaggccttttcatttggcttttgttgttcatttgttgaacataaataactgtgttcattatgcagacaccgtgtcattgttgacaatttggtgttgtagattaaggcaacgtgaccatgtaacaagttgggcaaatgcacttatccattcagtgagctctaacctacaaggtgttttgcttcagaccaaaatggtagactgcagaaccttcggcgcggattttaagtccatctttaaaaccataggtagagattgtatctgtgtgttcttctttaattaaaaatgggaaaatgatgcgacagagcaaagacggccatggatcctttttatccctctcccatccacacagagagtttatttcccctcccctggagtccaggctggccttggggttgccctgaagtgatgccgggccctttctacacgtagcctttcaaaggaccggcagcttccacttcctgccttttggaaaagcttgctttagggatccagctgccacctaaaggccctgaagtgagccacgtagagagaagttccagctttctagcccatctccaagtgtcaggcaggtgagtgaagccatcttggatgctccagcccatcaccatccaactatagtcacataagaggccactgatgggcccagtccgtctccacactcctgagagttagtaagtggctgtcgtgttgggctctgaagttgtagactagtttgttagtgacgtataaccaaaagagagagtgtacttaacatttagtcctgggaggttcgaactttgcctccgcctgtacgtgagctccctggagtgtgggatgaaggagtgcttggcccagttgttttcccggaagctggaggagggcagccatgcacaggttgtgtagaccaaacagttcagggatgcacttggcttagacagctgataaacagctgcagtgcccccaagggagttgaaagagtgggtattttgttgtcaggagtagaattattcaccttgaagaacagaagatttgtagtttaaggaaattcaccatattcttaaaagttgcagaaagagaagagttcttagcctaggcctgcaccaagatccagttcttttgaatctgatttaataggcagatgatgaaggacttattcccaataataaagaatagttcaataggaggttggtagtcttaattgtcttccttgtcaaatcctagtgaatttcacatcagatactgtgccctgtgaggctctatcaccttagcacttggtaatacgttttttatgtagtaggtgctcaataaatgggttgagtttctataataatttgatttctgtagcatctgatttaactaagtttgctataaaacgaaatctgctattgtattcaacatcacaataagcagtatcagttgtaaatcatacctacatacagttaacccttgaacaaagtggaggttggggtgtcagcatcttaacacatagttgaaaatcttttgactcccccacaatttaactagtaatagcctactgttgacagaagccttactgataacttaaacagttgattagcatatatattttatgttataaaaattaaatactgtgttctcataattaaactagagaaaacgttaaaaatcataagagaaaatatatttgctatttattaagtggaaatggatcattgtaaagtctacatcctcactgtcctcacattgagtaagctgaggaggaagaggaggggttggtcttgctgtcacaggtgacagaggtagaaaatccttgtataataagtgagctcatgcagctcaaacccatcttgttcaagggtcaactgtacttgaatggatttttttccctgtcataattaaccacccacacacatcttactagaccaaaaaagaaaacttgtcaagcaaataatctcccatttcttgggtcatttggagagataacacaggccaggttatatgtcctgaaagatgagaatgtgtgaagtccccagagagtctgatacgaggccttcttccagggagtagtggtctggccgctgcaccagcctgccccctgccatgccctgactcacctgcacatcatgggtgctgctgatgcccaggcttcatggctgagcatggcacccttagcacccctcacctgttacccaacggagatttgtgggtcggaggcatttcaattggagaaggatggaatggctgagggcaggaaaacttaacaagcaggaagtctgcaccctggctgcacatgagaatcccctatgggcattgaaagtagggggagcattgaaggtagggggagcattgaaggtagggagcagtcaggtcccatttcctaagcggctctgcaggcctctaagcttgtcagtcatctttttggtgctgtgtggactagtgccagcaggaacaactggatagttttaagtctttggcctcttctgacactttttaaaccaaacattttattaaattctcattcaagttaatagcaaaaaaatattactactggtttcatgtttaggtctcatttgcagtttttaaaacaacctaacggagtatagtaaatacataaagtactcgatttaatgtgcattttctttttcgttttttttttttttttttgggtggggaggggggtggttttctgagacggagtctcactctgttgcccaggctggagctatctcagctcactgcaagctctgcctcccaggttcaagtgattctcctgcctcagcctcctgagtagctgggaatacaggcacatgccaccacacctagctaatttttgtatttttggtagagatgagttttcgccatgttggccaggctggtcttgaactcctgacctcgggtaatctgcccacctcggcctttcaaagtgctggaattacaggcgtgagccaccgtgcccagccctagtgttcattttctgacaagttctatgaaacctggtgacttaacttttctgaatctgtttccctatttgtaaaatgacaatacttgcagtagagtttatgtaaggaattaatgagggtaactttaagatctttgtaaatgctaatgtgttttacaattgtggtcagctataataataataataatattattattattattattaataaaatgcttactaggcgaagttaatagctcccacccattcccaaactacttaaggaggattttaagctggaaacagttaaggaaagccgcatgatgccatgagcaaagccttccatctgcacttggcatattgcagggtctgtagttgctggaatgcctatgtccctggttacgagccttgatataattgtgctaaggcattttggtggagtggaccgtgtcctgctgttgatcaaacatttctgtgtggagagactttgtttttcccttggggagtatttattttttagtgccaggctccgggttggctgtgctacgcttggcttttcagtgccaggcatacaaccatgtcagaagggggactgcatggtaggtctcaggaagaagggccgaggaagaggagaaaagggacttggctgtggacggggaatcctgtgtatcttggcttctctgagccagctgtgcctcagaactttgatttgatctttgtaccccatgggtcctgccaggtgaggggcacaatggagaagagaaaaaaaaaaatgctctgctgaaaacataagcaacaaataaaatagaggatagtaatcctaggataatccccgaggcagcagagaaaggcaggctctggcttgcatgtcaggagctctcttcctgggggcaggagggagggtggtatagtcccagatgagtgcttggcaggttgtttagagcctggtagcagtgaaaagaaatgtctaccaggcatcttgtgcatgtggtagatcttgacttgtaattgtggcagtctcccctaggctcctcggcagctaggtgacagttgcctgctagttcatgggtcaccttctcaccctctggcttgcttctcagtgggtgtaaatggggtaattaaaacctgtggttttagactttgctccaaagactgtttctggggttctgcagacattgacctgaaatttatttttattatttttaacgtttaccacctgtgaagatactgtacatttaaagatataaaatgtatcatattaaaataaaatagcctgtatgttttacattttgagattctgtttatgctgtttttttaaaaagttagaaatgtattggcatgttctgatagcttatttttaactacttctccattgttgtaatatcataacaggttggactggctaggctatggtcagaaattgcttatcagtgttttatacatacccaagggattccaacacagggtgtccatggtcctctttgagaaaactttgtctaaaagatattgaatgatgcctcattaaaaactcctcagaaatattttctcctggcttgttttcgccttccgtgtcattgtttgagaaatatccaagattccttcttttttacaattaaaaaaaaaaattgaagcaagtccataatcccatgtagttctttgatagaattaaacttcagataggcataagaaattcagataggctttctctccactggaaatgcatgcctttcgcaatcaacagtgtatgatgtggtctgttctggagttggggtctgacccttcagcatggccagcgctatctgaagatcagaaaccctggaagccccttgtctctttttcatcttccacatctgtctggcgtccaggccctgcccctcctgcctcttcactgccactgctgtggccagcctcttattcagaggagtttcctacctggttagacacttaaccacctccagacggaccccttctaatccacgtcccacattatagctcaaaagtatggattttacagatcttatcctctcctgttctgccaaaaccccatacggtcctccattaccaatcaggtgaatcgacttgcatttcccagcgtgtccccacacccacaaacactccatgacactgggcccgtccctgcctttattccctgtggcccctgtgtgcaggagccttccctcccctttctatcagtccctcatgtacaggccttcagccccctcactctgccctgttcctacctccatcattgtgccatttatgtttgcatgtctgtcttctctgtcatatctatctcaaactaggttgaaaattttttgaagatggagattttcagaataaaattgttcacacagttatatatttgactgattatacttttatttttatttatttattttttttgggatagagtctcactctgtcacccaggctggagtgcagtggtgcagtctcagctcactgccacctctgcctcccaggttcaagtgattctcctgcctcagcctcccaagtagccgggattataggcatgtgccaccacatccagctaatttttttttttttattatagtagagatggggttttgctgtgttggccaggctggtctcaaacgcctggcctcaagtgatccgcccaccttggcctcccaaagtgctgggattacaggcatgatccaccatgcctggccgattatacttttttaatgtgttagttaagatgagagagtccaaagtgatacagcccctgcccccacagagcttccagtctagtgagagaggcaggtaccaaaaagataatgcacatgacagaatggactgaactaagtagtagtagaagttcaaacgaagaagaagacacaaatggataaaagctatggattctcaggattgaggatgctgaaaggctgcacaggatgaaaggtgcgaccaagggtcctgaaaaaggcataggatttatacttgcaaaggagggcatttccagcaagaaggcttggaaatgagaaaatctcgggagaataggcccatgttagaaattcggtacacgattgagaggaaaagaagtgccactggggaagtgtgttgaagcaggtatgtggatgttcttccctatgcagtggtgtcagtaggattttttgttggtgtgagatctgggatctgtttgtaagccgtctgagagctgggactttgcattgatcaactttttgttgcacatgctctgtgatgtaattggcactgcatgatttgacaagaatgtgttttatgctctaaatcaggagtgagcaaactttctgtaaaaggccagatagtaaatattgtggcctctatttagtccattctgaatgtacattagacacaagtttctaaagtacattcacaaataagcattatacacttagttgtaacatacacggatgttgagcagagaaaaagctctctgatttttgtggttcctgctctaagccaggctaagtggtgttgtcagggttccaaccccttccatccctgaagcacactcagcaaaccatctagtttataagccacagtgtgctagtaggtgctgtgtgtatttttttgcggggggaggaggtatttattttgtttttgagatggggtctcactgtgtttcccgggctggtctcaaactcctgggctcaagtgatccttctgcctcggcctcctgagcagccactgcacgtggctgcatcgcttttaaaggtagatgatgcctctggcctttctcattgcctctgggtgtgtggcccatgtcactgtccagcgcattccactgtccagcccattccactgtctggccccatgccactgtccagcccatgccactatctgtgtgttccgtgccactgtccatctgtgtagggaagagagcaccaggggctggcctggtcaggagagctttctgggcaggggttgagggaggcacatgtgagctggactttgaataaaaagaaaggaaagccaaggagcagaccgggcgaggctgggtgcgaagaccagatgtggcagggatttaggaggcagagcgagcacaagtctgtgcatattggtaggttctgtagacttgtcggttgtgcagtggattcatggagcctgtcgaggaagctacctgtgtgcttccactaggaaagcacagccacagagagaagatgaggggcagggaagcagtattgtggggaattcggagtgagggctgaatctgagaaatattattttaaaattatgttaaatacattattttttgctgtctccaaccatcattactatgttcactgtagaaaaattaagaaagtcagtatggcatatagtcccataaccaagaaattcattcattgtgacctatttgagggtcatttaaaaatgactgatgtaatttggtaaaagattaatcaacaaaatgacttatttcataattaattactttccactaatgtgacatttctcaaactctgcagtatttccttttcttcttttcttttctttttttgtttcctgagacaaatctcactctgttgcccaggctggagtgcagtggcatgcaatcatggctcactgcagccttgaactcctgggctcaagcgatcctcccgcctcagcctcctgagtagcttggactacaggcatgcaccaccatacccagctaatcttttatttttttgtagagaaggtgtctcactatgttgcccaagcagatcttgaactcctgagctcaagcaatcatcctgccctggcctcccaaactgctgggattacaagtgtaagctgctgtaagctgctgtgcccagcctatattttcaagtctctctccttttttttttttttaaactggaaaggatagctgtgatggaaatggaagacttccaacagaataccttagttagcataactgtgtagtacaagatgtaaaaacctgttgaagtgggtggccttttgttatcattctgtctttctgcccaccctgtggcacagttctcaccatattttctgtcaactgctaccacatggtccccttctttatgttataaagtctcttaattattaggtaattattcattgtcctagctctccatgcttaccaaacaatattaacaagagcacggtattacaaatgagtcaataacaacttccctaaccttatggcagctgttttggaggaaaaagaaaaaagaaaaaaaaactgcctttttttttcttaatgcgttacaattggttgatcagaacagttttaaaactataaaatgttggctgggcgcggtggctcacacctgtgatcccagcactttgggaagccgagacgggcggatcacgaggtcaggagatcgagaccgtcctggctaacattgtggaagcccatctctactaaaaatacaaaaaattggccgggcgtggtggcagtcacctgtagtcccagctactcgggaggctgaggcaggagaatggcatgaacccgggaggcggagcttgcagtgagccgagatcgcgccactgcactccagcctgggcgacagagtgagactccgtctcacaaaaaaaaaaagcaaacaaaataactataaaatgtttaataaacatattttaaattaaaaggtaaggttgtatctagttatttatacagctatttttaaaagtcaggttggcaaaggtctctctgagtttcacaaaatatccgcgtgagtggtgcatagtttgtgctggcttatttccatttgttcgttgtgtttatggtaaccagtagcattttctaatttggttaaaatgctgtcattagctggtaaatgcagtcctgtcacctcagaggaggaccaagaaggagctctttctagaaagggagggatcgaattactcctcatcctcatatctacttatctatctgattttaagacaccactgaaatttatactgcgagcaatttaaatgaatgcagtaattgattgcaaaacatgtttgtaatatcagtgactgaaattaaataaaagataagtcagtactttttggatcaatccagttgatctaaaaataaaaagtagacatccactgaatggttgggtaaatgaacgaatgaattttggcttatgtcagtgaattggcctgactgggccttgatctacatagcttctcttgacattttgttgcccaaattgagtttgagtgtttttagtaggcagggtaaattagcggtatggatgggtataacattctacatttagttttgctactgtatatgagctcatgaaatggacttcccttccctaataatatagaaaaaagaaaaacctaaggaaatatagagaacacattcaatttgggaaattcccgtctgtatcagtcaaggataggctagatcatgttgatcatgctgcgtaacaaaccacatctcagtgaattaacccacaaagggggattttcttgctcacaatacacaatctgtgtcagcaggagagcagaattatctgtcgtcaccaagagtccccaggatgatgacggctaatcccattgtgccttcaccatcactgccataggtgaaaggaacgtgataaattgcacactgccttatttatttatttatttatttatttatttatttatttatttagagactgtgtctcgctctgtcgcccaggctggagcgcagtggtgcgatctcagctcactgcaacctccacttcccgggttcaagcgattctcctgccttagcctcctgagtagctgggattacaggtgcacgccaccacacctggctaatttctgtatttttagtagagacggggtttcaccatgttggtcaggctggtctcaaactcctgacctcaggtgatccacccgcctcggcctcccaaagtgctgggattacaggcgtgagccaccatgcccagcccatacactgcccttttaaagcctgtgttcgaaagtggcacacatcactgccgctcatattttactggccaaagcaagtcacgtggccatgccatttcagattgggaagtacatttttaccattgcccagaggaggagagagatatgcaatatttgagaatagccctaaagactacaatactatcccttagtccacctaaatgatcctgaggctttggggcaattaaaaaatccttactcttaaaaaatgtcaggcagtaagtcttgaagccagctgctggtgctacacaacatacccttgtcttgtgaggaatcccttttgaaaaggtaacttacctcgtcacttcattattgctcattgctacaggttgaattgtgtccccccaaaaagatatgaaatcctatcagtacctctttgaaaatagggtcttatttgaaaatagggtctttgcagaccctcttgcagatggagtcaagttaagatgaggccatgaatgtggaccctaatctgactggtagccttataaaaaagggaaaatttaggctcagaaacagacatgcacactgggagaatgccatggaaagatgaaggcagagatcaggtgatgcttctacaaggcagggaactccaaagattgctagcaagcctccagaaagcaggggagaccatggaatctccctcagccttcagaaggaaccaccctgcccatatcttgatcttggacttccagcctccagaacttttaaaccatcaatttccattgtttaagctactcaagtttgtggtactttgttacagcagttttagcaaactaatatgctaatcaatatatatttttatcatcttctttggacctagcaaggagaaccacttgggaaattgaaacaaggaccctctcgggaaagtttggtgaaatcctggccaacatgatgtctaatgctgattgcagtgaaattgagtactgttgttgatttttttttcctcaaagtagcttttggaagtgaagagtaaaatgtgttagtgggaactcagtattagcaagaagagaaataagggactatgctagcaaaatgaataatctgtctttattatactgtcacaggtggttatcaagatacagtttttgtgagacaaaaagctttgtggggctggagttgcttttgatggtggtggcagagggagagttatacgaatagaagtaacttctggtagtgtcttcgttgcatgtgggtacacccagtcttatgggcaagctgattttatataatcttgttcttttcagtaaattttgtatatcaaatatttaatcttacttctttgaaaaactttttagataagtgatgtttgcaaattgaagcatattgaaccatatatctggatattttgtttgattataaacccatttttacaccatggccatagagaatggtgccgtgggcactatcaggagtgatgtcattaaccccacagggctatgtggaaagcgtgtggctgggactgctgtgtggttgggacaaggcagtggtgcacatgggccagctcctgtaactttcctgtttgtggctctcatggggcactcctgctcctgctctccccgtcctcatccatgatacatactctctctcatctacgtgctcataaatttcagcagcaagaactgcatgatttttaaaattctgagtagatgcttccagcaaaggatttcctaactgatcactgccagagaagaagaggtgctaaatagttgccaagttacatgctttttttcccaaatgaagtacttcccctgctactgcttgtaaagccctgattgtgtgtgtgcgcagaacccacatctggtgctggaagcctaaggactagtgagtggtcatgtggtttatggcccctataaaaggacccattctaaaagtctccaagaagctaactccacaatgagatgatgtgtgtgtgggtgtgtgtgtgtgtgtgtttgagatagggtcttgctctgtcacccaggctggagtgcagtggtgtgatctcggctcactgcaacctccacctcccaggttcaagcaattttcctgccttagcctccccagtagcttggattacaggcatgtgctaccatacagaattcagattcctctcctacccctagcctgatgccctttcattagctatacaaaggtggttgagtttcaggttaggcttattatcgtttaaactataaactaaatattcaccaaagctagcccagcctaagcccaggaataatcaaggcagcttgaaacctaaaagcaagaggaggctgggttagatcagctcactgtataatttttgcaaaggcggttttattgaaacctgttcttttttgaaagctggctctttctaacattcaaatgcttttgatcaacctattttatggaagcagaatattgaaattaaagtaaatattagatgaactttatagccagttgttttcctcattcttcaactctttaccctacaaatcttatttaaacaacatgttcagcaagctgttatcttgcttacgcaatgaatagaacattatgttctaaggtacagtttgctcacctatgaaaagaatttaacctcttttctaagtagctatacacaattgtcataccttaagttcttatttagatgcatttcagaatattagagcattttgcaagtagatgcacgttcttacccagtgtcagtgtttatagacagacactcaccatgggtatatttaagtctagggtggtaaagaatataaatgtcatttattaaaacctgaacatagccaactatgaattatttgtgttaatgtaaacgtcgaatgagcactgcaaacatttgatgtttgaatatttgcctgtagaagtgcagtactatgttctatagaatataagtagatgccaccccagtcctcaaggtttcagtgaggtcatcattgtatcaataaaggtgccaatttaagatgctaactggacattggaaaaaatttgttgtcctattctgaaggatgagtcttatataaagtgtttttaaaatactttattgaaactgccatgttcttttcaattttggtagctcccctgcatttaatttagtcataagcgtctgtattaatgggtgtgttcaatatgaaggcatcctgtgaagacaataaattatattatacttatctagtctgcactctttatcatgttgataaaatggcccttaccagtaaaaaaactgtttcagaatgtgtaagagtaagtctgtctcagctgactgagggcttcatcatgttcatgataatcccagcagcttgaaatgtcaaactggtagctgatccatagcacacagtagtgctaattgagataggttggtgtggataattgaatttaattgaatattaaacaccagtaagtgctatgctagatgttgggaccacagtgatgaagatgacattatcctgacccgggaggcgctccttatgtgcataaactgcatttggaaattttcatgatttgagagtcatctatggttgccagtagagattttcccagaaggccaaggatatatggggacatttgactgttctttgaccataattatataactttttatttgcccagaatgaacaactgcagggtaacatttatacaaaaggaatttagtgtgcttagagtgctgataatacttgagaaactaggagagctgttttaaagcacttctttttcttttttttttttttgtttttttctgggctgttagaatttgacattgttcaactttaactttgtcctcattgaactttatcctgctaaggagctaaaaggtccatatgatcaaaaaggcagctctcaacccagcacgaaattccaggctcattcatttctgtttacctactgccaaataagtcagacaactgcatacttgctttacagacgaatagaggacagcatgttgttcaataattgtagtttaaaaagtatatgtaagatacatccacaagaagaaagatagagggagcataccgtttgtcttctagtataggctccctgcccatggagatcacagagtagaattatgatgggtgccttagagaccagcctccctcaggatcatgagttcacctcggcaccacagctctgggcaacgtggaattagacaaattaaagtagttaagttctgacttcatagagcagaatctaaacttttgttcatactgcttttgtgttcttgggccatctgaaaaccttttctgtgtaaatattcctgcaatatgcggtcttacagaggtcttatcacgcatatttccctttgcttccttatgtatcgtattttttcaagaagaagacattcaactttagagacaatggaatcattgtgttgtggctttaattcaggtcattgtccttttgtgagttgcacgtgtgcgcgagcctgtgtgttttgcttggaggaatagtgaataagcaaggagcagagtccatttgctttttctaacagagggtggggcagattctctcacaaccattaaagaaaaaaataagataccagcaataatgataatcagtcatgcatatgtaatcgtgtgtagttcatacttcagattcatatacagctgagcatgatcttgaatgttacaggaagcaagcttgaaagtcaagttacagtagaactttgctaattcatgcctgactaatttgcccacccagtagttcctactgaaatcttgccattcctctaccaactttcagaaaaatttgatagcaggctgtggagaaggctcatgttacttcttatgtcaaggtgtaaacaaaaaagagagcacaaaatacatccatcagaccacatgaagtgaagagagagaaaacatctgctgaaagccggattctctgtttttttcctgctttttaaatgtaatctgtctttgtttatgcatgccctagaaacatgcataagtaaccctgagtagtctcttagtttaagaaaacctactataaaatttcttgttgtaaaataaaattctaaaaggaataagttgtggacatataagtatcagacagtttatgtaagactttacataggatgcaaggtaggctgtaatatgatttggtaattgttttatgggggaattttgttttgtatagcgaaaaagaacagtgagtgatttaactgaattttatagtttaatattgttgttgttttaactaaaatctttggtttgctattgcaaaatgaaagagaaaggaaattttggttaatgttaactttatttccaaaaccatgtgatggatgctgaccaaatgtgtctcaatagtgccattgaggtctgttgcctttttttttctttgaggtgctaagtgaaatgtgttttgaaccttgaatgttcactatgcgacgttctttgcattacaggtagatactgcaaacttgcttcaaaaaaactaaaaagttcaaataactaatggttcatatttgttccagttagtaaatatcacgacaaggtatcatcgtcatcccatgttctcagtatagattcagcttcatttcttacaccacacacccagaggcataaatggaagtacacagacaaaaggaaaggcctgagtttaaatgtagttatcatgttcagtgttcgacattttattctgagaatttaagtgtttctactgcagtaccacaaagtcaatctgcatattactttaactagatcacttgtaaaaataaatgaataaatgaccagtgatggttcagtgacaagagtgccagatgagtcatgaatgttttcacaagtaaatttgatagtaaactgctaagtttactgtatacgctgtgtacaaattagctcagattcaagatttttgctctaacaactgaacgctcagttgcatctttaaactttttgttgcgtgagaggggctgaggggcaggtgggaggaagtcagcctgcaggtgggaggtttctgtctcaggattgctgatacccctgcatgctgctgggttgcagccttggagtatatggcctatgagacatggcatgtctgatttgatggaaaaagcagcggagaaccagtgaaccaagctattccgtgtattgactttttaatacgtttactacaagaatctgccttttaaagtacttttaaataaggttataaacataagtgtgttttggacacagcctgcagcaagcatgcctctcgaggtgtaagatgagtcagctacacatgctcaggggcccgttccaccagccacagtagctgcagaggttgagagcaactgaagcaagagaagctcttagtaattaggggaaggaagcctccacttgacaccgcatcaccaccaagtatttattgagtgtctttggtgtgcaaggcaggagaatatcttctatggattctacatatttcagggttaccagagttataaaatcccttgaaatctatatgcacaaattgtaaatacgtatgcagctttttataagtgttcaaattctgccttaattgtgctcaaggatcagggtctcaccccagcattgtataccattgatagtcatgatttccttagtgaaattaagtaaattgactttcagagactttatttcatattcatcatgtccccatgtagccatgaaaaaatgatatgtttaatattcatctatttgtatgattaaaacaaaatatccgcaactactgacgattcaatgatcagatattttactgtaaattaatatcatcataaactcctagacattagacttcagacattcagagcccactcgatgcttggcacaaagcaggcaccaaatacatatttatagaatgaatgaacaaatgaaggaagaaacaaagaaatgactaatgcaccaaccatttatcaggaagtttaacagggaaattcaacaaccagatttgttttgctaatcttattaaagtgcaacatgtttgttgtaaaaatagatccacattcgtcattgaactggacagtctaaaatagatccaaacccattgtttgattatacttcacaaatgtaaggtaaaatagatgatactatctgtcatttgcttgatgctattggcaaatgtgaagcagttaccagcataaaagcttggaggttactccgaatgtatataaacaacagtggctaggctcacaagtgggagagagtctaaaaataggtaggcgatcccttatctcgttgcattgaaaattgtgtttatatgaagtgatattattagaaatgatgtgtgagaaaagaatttctgcaatgtctcctacaaattagagtgagaaaatgtatctttatgcagctttgaacaaaggattattattgctggactgtggaccaaaattttagtcaagttttttttttttaatgaaaagaaactgttcatttatgcagacatacaactttgtgtcctatagagacttgtcatctgctcttaaagttagcaccctatttttcctctggatgtccactgagaaacccactggtgtgatggtcattgaaaaagagagttgtgtcagaatgccctaaaatcttagtggcttaacacattcccaagtttatttctcattcacactacccgtcaacataggttggcaggcattcggatccacagggtcacacagagaaccaggccgaccgacccacatggtcacacagagagagaaccaggccgaccgacccacatggtcacacagagaaccaggccgaccggcccacatggtcacacagagaaccaggccgaccgacccacgtggtcacacagagaaccaggccgaccagcccacatggtcacacagagaaccaggccgaccaacccacatggtcacacagagaaccaggccgaccgacccacatggtcacacagaaaaccgggctgactgaagtttgcactggagcttttcacagcccccactcagaggtgagataggtcaccttttctcattagccaaaactggtaagatggccttccctgaccacaaggatgctggaaagtgtagtcatcttttctctgtgcctggagaggagagagaagtgaaaattggtaagcaatatttctattttaaaagtggttagagtgtagtgcaatgaatctagcaccattggttcagttttaaatggactgattccatttgtctaattctgtgtcagttggctgttttctgacccctgagaataatttagtctggctgattcccccattgtaccaattgcctggcatatgacaaatgcatttttgcctgtaagacaatctttgcctaggaaagacagccctaatttttatgtcttgtattttccagtaagctaatctggagtatcagtttttaagactgatacacaattagatgaaactaattaaggacaaaacatttgccacttttaactgttgataagtgaaactgagatttccccccaccccatggatacagtgaacatttgtcagcagctggtaatggctagtataaagatgtattcagttttcccttcccttcctctccctccagccttccagccacccccttcccaaacatttatgctcatttagagaaaagcaaccccagttctcttacctgggatatcaccagtataaaaagcacattcgtataaattatctggcctttaattacctgtaaccctgtaggaaaccccctgggaaaagtaccacaaaagaacgcagctctgggggtctgtgagaggcacccagttcacacccctaaaggacagagcgagcactcaaacgcacagctttgggtgccctctgaggcgtgcactggctggtagcagtgggtatcaaccatggaagttcacggaagattaaaccgcaagttcccacgcaaggccaagtggctgccaggacttggaggcactgaccctgagtggtccttccacctcagcgtatactgtcactgctgcctctgtggcttcccctttccctccaagtagagatagatgtctcgaggtgctccccaccccagccaggttgtcctctcctgggtggcattttcctttctactctctggggctttcaccaccccactgggcataactctccacaggctcccctgggaggggtgcccccacctcacccgccacctcacttctcagcccctcttcccatccaagggctccctgggctgcccccaccctagtcatgatctcgctcctctactctctcgtagtactttatttttaccttgctcctggctcacattacatgcttatcttgtatttatagatggttctatatatgtctccttttgcatccttttctcaaagctcctgtgaggccagggatggttttatgccttttctcatccccttatgttctagtataatgctttacacatgattaaattctcatcagatgttgaatgaatgagcttattatgcattacttcttagtacaaagaaatatttggaacgtaagctctgaaatgttgatattctgtggatgcttggattacatacaatgtcctaaataaacacttgcctgttaagtagaagtcagtctggaaagtgatacctttagatccataaaatgtttataaggcacatgaatggacaaccacgttgttttttgctcttttatatgtttaggttactgacagcccaaaatacattagcttgtctttgggctaggaggtacctaaagttgtatttttctctcatgtcattttcctgggtttttatcatatccaacttcgtaatgtccaggaatttgagattaattcctcaaacttgtcgaataatacaagaggaaacttgtataatacagagcaaacttggttggtgagtagctgctagagcaaacttggttggtgagtagctgctacagcccatacatggatttgtttcttcaggtggggggataattgtatccatggactcttcttcattaactgacggatcaaattattttatgaagctatgatgagaaatggcttgtgctcttgggaaaatcaatgccaatgtaggtaatgcaccagtctagctggtttttaatttaaagaacaaattatcttctggaatagtaataaatccccctttggaacagcaagaagacatcagctgttggatatgggataattaccatatgtttcaatgtcgtaaaaaggcacagcaattttaataacccaggttgtgtacaagaaagctcttgcttctgaagaatccatcaaccatgcgctatgatcatgtaataataaactgctgtttacttaatgctgtttttatttaaagttttaattaacataacctagtctttgcaaaacatctgattacctttgactcatatgttttctggtatataataatgggttctcatgagttgtttattttataagatctcctgtttactcagagtaaggaaaattttttttgaggtaaggtcttgctcaggctggaatgagtggtgcagtctcaactcactgcagcctctacctcctgggctcaagcaatcctcccacctcagcttcccaagtagctgggaccacaggcacatgccaccatgcctgactaattattgtattttttgtagagatggattctcactctgttgcccaggctgatctcgaactcctgggctcaagtgatccttccaccttggcttcccaaagttctgggattacagtcatgaaccaccatgtccaaccaggaaattttggtattaggaagtttcccacataccatttgtctttggtgccatgaacacctattttgtctaatttttataccaacctttcactttggcacatgggaaatctgataaggaatcgatatcacggaaatacacatcacactttctgcttgccgctttcttccaaaataaacccaaggattccccttttccaccaccaccttaatttagataaccaagataaatgagaaggttttcgcacttgatggtgggatttcttatcaaggctattgaatttggtttggcactgactaattttggtatccatgtgtttttagagtaagttgtagctagggtggtggggtgatggggagactctcactgaatggctctaaattcagtattttattctttaaccaagcagctgttcacacacatttcttaggaagtggctaaataaaaatatggcagccctggaatgaacagaaactgttgctctttcaaaaaccagcagctacaaatagtgatttttcttccacaaatacttgtttttctgtgacattctcattggttttattcagttaaactcccagaccatgttgatttttttttgccttttattttttgagctcataggtaaaaggagttgaagtgattttattttctgtttttgtcttttttttttaagtttttgtagagacaggggtcttgctatgttgcccaggctggtcttgaactcccgggcctcaggcaatcctcctgcctcagcctcccaaagtgtacccagtctcaagtttttttcacattatatatttgtgttctttctgtttttaactaatggtctccattatttaggctatattaaaataacaataaaaacagagcagatacaacagaattcatttggttggccattggagctgtttttcctttttctttttaaactgactttatttttttggagcagttttaggttcagagcataattgagaggaaggcacagaaatttcccatgtatttcccccacacaggcacagcctccctcatcatcagcatcccccaccagagtggtatgtttgttacagttgatgagccgacattgacacatcatcacctaaagtccatagtttacactagggttctctcttggtgttgtacatgctgtgggtttggacaaatgtataatgacatgtattcactattatggtgtcatacagaataatttcactgccctaaaaatcctctgtgcttcatctgttcatccctaccatgcccctaaaccctggcaaccactcatccttttactgatttttacagttctgcctcttctgggatatcatgaagctggtggaataatgcagtgtgtagccttttcatagtggcttcttttacttagtaatatgcatttaaggttcctccgtgcctcttcatggcctgatagctcatttctttttagtgctgggataatattccactgtctggaaatgccaccgcttagttagtcattcatctactgaaggacagctgggttttggcaattatgaataaagctgctatgagctttttaaaaaatagtttaaatgacatatcaatactttaatatttaaaatatctcagtgatcatatagcctcagaaagcacagttttctgagctgggtgtcatgttgagtggtgttagagtgccgtgctgcgtgctcaggtgctatgctgtgaggaaggatgataggagcagattctgtataagcagatgcacaaccacccacagctgcactttggcacccagggcagacaaataaaaagggggcaagatttttttaggggagattcctggcagatagagattttcttcagaatgtacagatttatttttggggggtggttaggggcgacagttgttttaagcagagttttgaaggagtttggtttggtgagtgaaacagtatttcatttttgattgcctttgtttttccagcaagaaagctactcctggtctgtgggcacacaccaaaaggctttgggcaagacagagggagcttgtgtgtgcccccagaccggagtcataccacagttgtcagatcactttgcggcagaccttccgacagtctcctcatctctcttgtggaatttgagtttgacccacaggtagcattttttattttggtggtaccctgatgtttataaggaacctcaggacactattagttaggaaggagattgtcccatgcaattcagccttgcaagagcttcctggttgatctagggacaaggtgtctatcactcagccctccaggtcttttcttcctaaagcaggctttggagcaaagcctgaccggtctttgcctatgactgagtttcccagggctgctgtaccaaactactaccagttcaacttaaaacagcagacatttatcctctcacagttttggaggccgcttcaaagtaggtgtcactgaactgaagtcaggatgtccgcagggctgcgctccctccagagcctctaggaacacatctgccccttgcttcctccagcttctgggggctgccagcgggctccagcctctgccgctggggctgccttgcctcctctgctgtgtcagatctccttctgcatctctcttacaaggacacttgtgggccgggcgcggtggctcacgcctgtaatcccaacactttgggaggctgaggcaggtggatcacctgaggtcaggagtttgagaccagcctggccaacatggtgaaaccctgtctctactaaaaatacaaaaattagccgggcgtggtggtacgcacctataattccagctattcgggaggctgaggcaggagaactgcttgaacctgggaggtggaggttgcggtgagctgagatcgtgccactgcactccagcctgggcaatagggcaagactctgtctcaaaaaaagaaaaaaagttaaacgagtgtcttggcactcccctgtaatcccagctacttgggaggctgaggcacgagaattgcttgaacccaggaggtggaggttgcagtgagccgagatcacgccactgcactccaccctatgcaatagagtgagagtctgtctcaaaataaataaataaataaaaataaacaaggacacttgtgactgcatttagggcccagaacaatcccccatctgaggacctttcatttaatcacatctgcaaaggcattttcatgtaaggtaacattgaaaagtttcaggggtcaggacctaataaattttgtgggccagtattcagcctactgtcccctagttacaacaaggatggggcagcttatggacgagagtgtcaaaaaattcagattctgtcctacagggatcatcttaccctgcagctgagttgagtgattattgagaacatactacgtgttgatgctgttgcttagcactgtgggagatacagagatacataaaactctgcttgccctgaggttgcttgtggttttgttggaagagaagacgtgtgtgtaaaattagtcataagaaaaaggtcgtgtttgatcctgagagccagatagtggtacccagcagtgagcatccaagcccttatctcccaaataggagactttgtaggctgaaaactggcccacagatttattaggtcctgacccctggaacttgtcaatgttgccttacatgaaaatgcccctgcagatgtgattaaatgaagggtcccggtatggggggttgtcctggatgagctgagtgggccctaaacgcagtcacaagtgtccttttaagcccctgctgtgcctgttctcttggtaaatatctctgtgtgctggaacatttgaccagagagagatttcggtgatcatatccatatttgactgtttcctattccataatttgtcgctgtctccgagtcttttcccgggagccccctattacaagtgcacctttctgtgtttattcttccctgttgtgcttcgatgatcccttttttctattcttcagtggctttttctccagtaaaatagcagtttaaattcttgaagggaaacaattaaaaaataatgtctctgggttaacaagtatgattaccgtcatctaaatcagtgatactacatgagaataaaatcaaggagacttacatttacagtagatgaatctatgataatatgccctaccgttttgggtaatttaaatttatgctagttcactctgtctacatgcatgtcatatcttagtgtaaattatagaaatatccctataaaagaaaaaataatttttttctgtatatgttttaagggaacctgaatttctttgggttgtaatgcatgatacagatagtattctgggaatacctgatgttcagcttatccctggaaccctggttatcttagtaaaatatgcagcaacaatatagaagacaatcctgaattttccactgcacaattagggcttgattcaccgtatgacttgggcaaattacttaactttttgaaaccacacttttctgattttcaaagtatgactaataatggtttctgccttaggattattaagatgattaaatgaaataatgcatgtgcaacgtttagaacattgctttaaagtttgtcttttccttctctctccccttttttcctttaaaataaacaaacatgtttgagggctgggtgagttgatgggctccctttagtgcagcacttctaagtaatcactgttccctctggttcattccattgagcacatgatgacaaacatttctggggatatcatgtcaccttggatatagaacagtctcctaaattacattttatatgacaatgtctcactgtatttttgtcctcttgaattgcagcatagcatattatttcttccagcaaaaagcaaaattaaataaataagtgattaagttgctggctgtagctgatactgattcatgacatgactgaggattacttagccatcacattgaattgatgacagttgccttctaaatattatctttagtcacatccctcgaatgtttgcagtgactttcactcctcaactagaatatgcacgtttacatacacatgcgataaggctgaagaaggcttgtggctcagcacaatttggtcttgtatgcacagtaatcattctgaagtgtatgattctgttttattagaaattctcacttgaatttcaagagaataaaggaggattcctcctacacaaagctgctaattgtttgcacactgtgtgcatcccgcatgataagcgatttgagaaggtgccacatcagtgcctttatccaagtgtcacctcctgtctacagttcccttagcagggtgaagggagaaagatgcaaagactgagcttggctgaaacaaatgtatttttgtccccttgacttcttgaattgcagcagagcatatgaataacattgatatatttcttggctgctagacaacaacgtatttctttgacagattgacgcctgaaaagaaaaatacagtatgtactaatgaatcaaaacattttttagtacctttgtgtatactaaatgtattttagtttctatctggagctagttgccatttactgtgggtttgaaatgccctaagttatcttctatggatgggtagaatcaatttacccacacattgacagcttttacagataggtcctgtaacagatataattaagttaaatttcataaatagataggcagtctcctccccagtcctggtccctttgggagatgaattggggtgggggtaatggagagtttcaaaaaggctttccggtgtctttttttaaaaataaggttttaagagtttcatggtcagctgttctcagtttttctcaagatggtatccaaagtaaggctcaaatttatgatttatcttccaaatgcttaaatggtccatttatgatctgccagatgttacaatgactagctccccaaggaacgatcaagaatgtgccaatgtctgggcaagatttttatccagcaaaaagaaaaaaaccataagaattggaggttttactttgaaaagtaaaatcagccacatccatgacttaagagactgtacatattgtcatgggtaaggatttagatcttggctccactgcttactcacagtgtaccctggacgagttactaggcctttctgtgttttactatgctcttttgtaacacagggagagatagcatctatcttctaaggttgttgtgaggattaagtgaactaacttgtgcaaagctcttagaatagtgctgggcacagagtggtgagtgccttgtatatgctaatagttgttgatttatagcttaaaattaattgtgtgatgcaaataggagggttaccaccccaagcttaaatggaagttttgcagcactttgcactcttgaggatgtatctgggtttaatagtaccttccatctagtgcacaagtcttctcccaggctcatcctcccaaacacctctcagtgttatccccactttgcaaatgcagtagtagctgggctcacagaagttaaataactacaccaagtcaccatccaaaaaggttcagggccaggaatagagcgaaagacagaatacggagccatgctctttttgctgtctttctcagtgctcagttctcagaattactcaggaatgagagcagagaaactctgtataggccatgcctggagttttttgcacatggcagtcagagagtcccagctcagttcagtgcagtattaccgaattccagtatatgctgggctctgttaggtgcaaggggttccaggatgaatgagtctgtggcccagtggacaaggtttgcccctgtgtgcagctctgtctgctttactagatttgctcctcagattctaaattggaagtatgtgcatattgcttgatttacagattattagagaatttttttcagttaaactttgtccaaaatagacactaagggcaaaggaaactggtattattacagcagggtgtatctcataagctctgagaattgtacatgtataaagaatctttgaatcgccgagtcttagccccacgttttatacagcacagaaatacagcacagaaagtttaggtgatttcccttgggttccatagtgtgttagtcaccaggttcctttaactctctcagtactctttcctttaaactatggaagagctcaaatgattaaatcaataaaagaatgacaacttatagagctcatttacgtgtctgaatatatcagtttagcccagagtatctgaactcctgggccattgctattcactgaccccttctcctcctcgtgttctagtaaaattcagcccatgaatatagtcattagaagttgaattttaatgaaattgggcgctttgatcaatgggaaggttgaaagttatgtgggaatcatctatatagtttatagctgtgactatgtaggccagctcctaagtgccccctgcaatgtgtcactctctctggttttctttccagggaggtaccctgtagaataacagtctaatttacctctcagacatctgctgtctttcagaccttatgctagttttgtgcatatcttcatgattcctctaataatgcattggattataaactattatctccacttgagagacgctcagagaggctagggagcttactcagggtcagagggagtgcagctgaacagttctgccagggtccctgtgattgttggagcagcctgtgttttttcaagctgttgtctgtgaatcgtacggtagaaacatggtgcgtatttctgcagccttagttctagccattgaaatatcatggagttgaatgcagaatacccattaatgtttaggatgaccaagaaactgtgcccaggccccaagcccagctctgtcatcagaggtgagttaccactggtgccatgccctttgattccctacaggcgccctatggaggtgcccaccagtgtgcacttggaagtgtgatggaacgcatcacatccccttgttgcccctgccccggtgatagggggattcactaagaacttcagcatagtgagagaatgtaactgaagctcctgggttagtgctgcttggtatcccagttactttgtagatttcggaatcttttgtcgtctagcctgaggattactgttgatgacacaattttctttgggattataggcttcatgtttcatacaaccagcatatacgtaaatggcctcttcagtgtatcatgtatacacattggtgaatagcttcccactagataatgttttaaaggggaaaaaaagaagtcatttctaaaatcccaagagagtgtccccgttttgaggttagagcacgttttttagccttatttagtcttgcatcttgctccttatgctacctttcattgctttatgaaattattttttaagggatactttctaacattccatcccactttttttaaagctcgttcatatactttgtcctcacagaatagaacagggtttctcaaattgcacacactgaactctgcaacacaacagttccttcattggagaccagatgaattgaaccactggctttctgaaaataactgtatgctttccagttggccagccttggcagggacccactactactcctatttctcaacagtcaatttaaaatattgacagtagcttaataacattcaatagtaacttgcagcagcctttcatataccctgacatctgagatatgtaccagtttatgaaatagaacacgcagatggtcttagccccattttccagatgaggacccttgtccagggaaggattggtgcccatttagctagctctttcccagcaagcaacagtacccaaggctccatgccccaggcctgggaggacccctcccacggcgtacttcagatctccacctgtgactttgaacacatgcttcgaggtgatgtacttcttggagatagtgctttcctcatctcttctaccttgtagtcgtcagtagagggcatgcagtgcaacagaagtggatttcaggactgagactagggtgaggcaagagaggcatcagaatgcaaaagtgaagtagacacctgccgtcagcactgggcagccctgctcctggggccttacttgactcatcctggtgggttttccaaatggcagaggtgcacaaccacttcttgcaagcatgggcacttgaattgtagcccatgtacacagtgattcttggaaaaagtcatgagtaatgaatggaacttttctctcccaggttgatcttgtgttttgagacataaagagtcaaaggttggtgcctaggatgctcattcttattgtttttggtagtttgattgttgaaggcttttgacacgacattgaagtgaatatttggggcattttgctcctctgggcttttctctaaagcaccctcacatttcctctctcatgttcctgggctttcctggctttgatgctagccccactgtgtgttcccattaatagccctatgtagcctggctccttattctggaaactgtgtaacttttgctcttgatcttaaacacaactcagtcttgcaaggagctccgcctttggtctcagcttcttggggatttccctggcagccacatagtgaactatgtcacactctctgttttacccgttaataaggaaatactctggtacatggagctttgcttgctgatctttttctaagtactctgggggcaaaaggaaaagcagctagaggataaggatgtaactttcttcaaattaagccatcctgacccgtggtagagattagccactaagaaatagtggaaacaaataactgtttcactcttgagtgttagcatggaagagattctggttgaaatcctagtcctgccactttctggttacagaaacttacattacttttcttttgatgtttcaaggagataggagttaaagaaaaatgaacaccagattactagaacattcttatagagttgcccaaagatggaatggacaccttccagagtggaggggagggagtaggattggacagtagtcctcaactgggagcacttcttccccctgaccccacacctgcctcccagggacgtttgacagttttggattgcacaaaactgaggggtgagagttgctgctatatctagtgagcagaagccagagatgcttccaaataccttacgaagcataggacagccctcacggaaagaattatctagctccaaatgttaatgatgctgactttgagataccctagtcagaagtaacatttattggccaggggcagtggctcatacctgtaatctcagcactttgggaagccgaggtgggaggatcacttaagcccaggactttgagaccacctggacaagaccctgtctctacaaaaaaaaaaaaaaaaaattagcctgatgtggtagtacatgcctgtagtcttagctactcaggaggctgaagtgggaggattgcttggacccaggagtttgaggctacagtgagctatgtttgtgacactgcacttcagcctgggcaacataacaagactctgtctcaattaaaaaagaaagaaagaacatttgttgaatctaattttcccatgtaatatcaatgactgtgcaagataaagtggtttttatcctcactttggatgagattggcctttggtgattgagaaaccttcctttggttgttcagctacttctagatagacatgggattttaaactagccatctatatgtccaaaacccatccgctttccacaaacccattatgtagttagctccccatcactgatgatgttcaaagctaagcagggtgagcaaccacttgaaagaggggatggatgaggatacaagcctaagatgtatgttgcactaaatgacttttgaggtccctcctaaagatcacattctctggttctattttgaaatgggatttgtctttttagccccagtgttagagtggcagccagatatcccttggctatgaccagtgaaatccctgtgctttgtgcacctgtgaatcttactcctattaatatcccagccctatcaggccagagggctagggttccaaacaggggcagccagaaatgcaccatcttctgcatcccatctgcattccgggcccaggcagttatttttacctccatatgtaaatgggcccagcgatttctcatttaggagaacagcagaggcacaagtgaggagagctggagaaggaggggaacctatcatatactctgagattgcaatttagtatcagtttgctgatcagtgtcactccactagtttaataagtaattatagtttctcttttgtgaacaaggaaaacgggtagcttcacccagtggttgtcagccctggccaaaaattagaataagatagagggcttttaaatcacacctacaactgagcccctccaccagaaatttaattttctgaggtgaggcctgggtacagtgatttgagaactttgcagggattccagtgtctaagcagcctgggcacctctggttaatggcacacctcagtgctgcgcattctgctccagtacctgctggtgttactctgtcataaagagactagaaaaagagtgagttgggccctgtttctcagtgtgtcttcagtggattgtagggagaaggaggcccatactctctgcctaaacgagcacctgctagactccgaaatctagttaatggaagtttctcctcatccttggacatccttgttttatatggtatacgttcaaaatacatataatctttggtttaatttgttttacaaagttttgaagttttcctctccacacttttctcatcaagctggtgtgtggaaagaaggaatttttcttttccattgctgtcatctaaaattgttgtgtcgggtggggaggggagggagccgggagacttagctttaactacttagaagttttcagggaaatgtttttataacaacctagttaatagtttgactttatgatagattctgttccttcattattttgtcctccagtggcttttatacccagcaaagtggaccatggtgtatgattcaagaagggtgaggagtatgtctttctttggaaaggcagggatggagggttgtgatttagaaagggtaagcaggaaaggagagccacagaaggcaagcactgttctcatgccagatcggtttcaaggaagaggacatatggaaggatctagaaaatgatttctctagaattgtccatgtccaagtcccctggaatgtctttgtatatccccagagctgtgcatgctccagtttgaagagctctgctttaaaagatatcaggggtgggggagatgaggggggtgaagtaaaagaataaaaactattcaattccatttgttttctctttcaagctcatacgttactcatttcatttttatattaaaatatagatgaggaaggaagggcacatggcaagatttggcaagcataatccatgaggggatatggagttggggatggcagcatagcatactaggatttttgaggagggattcggggagcctgttcatgttttccttacaactctggtacatgaagtacaggttctgcatcatgatggaagactgcctgggttcatgtttgggccactacctactagctctatgactttgggcaagtttctttcttcttttttttttttgaaatggaattttgctcttgtcacccaggctggagtgcaatggtgcaatctcagctcactgtaacctctgccttttgggttcaagcaattctcctgcctcagcctcccaagtagctgagattacaggcaaccgccaccacgcccggctaatttttgtatttttagtactttagtacagaccgggtttcaccatgttggccaggctgttctcgaactcctgacctcaggtgattcacccacctcagcttcccaaagtgctgggattacaggcgtgagccaccatgcccaggcaagtttcttaacctccttatagcagtgtttggcacatgatagatgagctacaggttggcttgttattccttgcaatcctgagtttctccccagagtaaagctggagcttttcccccagccaactttggtggagtccactgggcagagatgtgatttcagccaaaatatggctaaaggaggaaaggatctgagacagccaggtggaaatggctccccgggagagcctctgaccgacccgcacactgggaggagtgcgcactggggtggagccttgggaagttggagccatttgcagcagggaggagcctggcccctcgtcttcttggatggtacctaggattcagtctgcgaggcaggaagcacactagcaggactccagcttggtggagagttcctgctttcctttttttcctttttgtccaataaatcccatttttctcaccctttaaattgtgagcctaatttttcgtagtcatgtgacaaggacccctcttaagctgaactaaggaaaagtcctgcagcagatctaactagaatgccaatgcctacattgaggctgtttaatggagagtttatgaaaagttagctagtgtccttgtgtaaacctgtatgactctagttcagagtcttcagtaattgcaattcaagaataaaaccacacggcacttccattcccgtgtaatttgttgttgctggcttgtgacattctacatatcccaactatgagacagccaggcagtgggatggactgtgaggttcagatgcccggagatatgtgaggaagagcttttagcaataaatatgaaaatgaaatcaaagtaaaaactggcattgaacccctggtgtacttaggcttacttttacccaaatccaaatcatttcttgacactgcatggttaccaagagtgtctgtcattcaatatttcagattaagatctgttctttggtagctaagttcagagaaaaaaatataggatctagaagtatcattgctattttttccttgatacatttagtctggtattaaaattgcttgcagaagatttgattttaaaaaagtagaaaagagacacttatcctggtaaaattatcctgaaatcttaagaaattaagacaaattgcaccataaaaccagaagcacaaaattaaacaatattatattaagagaacccagtgacacattttccttctaaattaactttaaaattaacttttaaattaagttcaatctcatatcagtttgctttgtaagaaatagaatatatgtacatgtttgccttatttttagcatgttatattcattaaaatgttttagtttattcagcagatacatttagcatttctttcacaagaaagacagtgaaggaacaattaataacaggaccccagtaatacctggggggtttctacatctgcattttttgcaaaaatagaatagccttctaagaagctgtcagtggcatttgtgcagctggacagctttgcagcagatgtaacagtaactgtgatgccaggctgtgccccagaacctgtaagcatgacaagctctggcttcttccctcctctgaaaaggtacaacattgaagaggcagtcgtttcccctagatctgtaaccaagcacatctgggtgaaaggggaagacatctcttcacagagaggagaataaaggcggtgaccatcagggtgacaggcagcatggactgttgccacctgtgctgcaggcagcttcagtgcctggatggtgggacagctggtcctgcactcagcacgagtctcaggcagtggtctggccgcgcctcccttgggctgcttcttcctccaccgtcctccacttttgctttgtgtctgcgtcaagtcagtaacgttggtctgcagctcccatccctcctgatgggcactgcactgaggccttagtgggcattacctgatgccctcatcacccagtgtacaaacacctgctgacaagaagcgtccctgagcggaacccttctgctgggacaccgcaccttccgtgtcctgagtgggctgcaccctcgtggtgctcaactgggtgacttcacgctgtcctcagcgctgtcctcggcgctctctctccagtcagctctcctgctcaggcacctttttgggacacagtccttgccagttattccctgtttaatgtcctcatgtgtcttcacttgccctgggagactgtcgtcttgagagagcaagccatatgggaccctgaggcctggcctcagtttccctcccccccactgccccacggggccacgcctcatcagtggcatggaccttttagtcagcgagccctcagccggatgctcccgtgctggccactcctgtcatccctgctctgtcctccctgcaaactcctccctcaggaccctgcttgaagttacgtcctgcacagtcatccctggccttccctcagcagaatctgtcactccctcaaggtgtccctgcagtattctgctcatgcccctgctacgtggcagaactctgttgtcctatcctgtccagagctccaaagcccccagaccctgtggctgctgagcacttgaaccatggacagtccaggtgaggatgtgcggggagagatgcctcctgcctgtggctgagccctgcctgaaggagctgatgaggaaaagctcctaagcacaacagtgctgctcacctgggcatctagttggcagagtcctatcccagtgttcgcacccccagtttcctgggtcttaagttcagattatcaagtgctcctcctgcaaaaaaaaaaaaaatggtgattcttgtggcccttagttgaccccgcacctgggatatgcttatatttggtgtggggcagagaactgagtgttcttgaaccacttccacccaaccagagggaggtggggacatcaggtacacctcatcccctgatgtcacagccaagtacctggagccaccaggactccctctgagcccacaaaggagtgtcttctcaccaccccgattatactggtctagttatgctttggagttaaagccaggctgctattgcagggctgctgcaatccttgcaagcacagttgttctttgcttgcgcttgctctcgctctcgctctcactctcactcttgctcgctctctttctctctctctgacttcagtttaactttttaaacttcagtaataagtgttcctcaaaatagatggtcttcctggttgtaggtacagccagcagggttgagttctgctgccttccagcatggttttcctggggcctgtaaaagtcctgcaaatttgctctgacactctgttgacatggaggtcctgtttgttgttataaataaggaccagtgtctctaggacacaccttactgtgtataactgaatggcagattttgtcccttacttcttaaaaattaaatggcagaggagctggccatgtaaaagccctgtgtgtgtttaccaaaaagtacttgaattttgtttgggttttgtgttctggtgcatatgaagtgaattttggtaggagtatgtgcattcagagaatatgtcatcacacttttttctttatttgagtgccacttggctcttatttgattaaggtaatttcagtgacatattttgaagcaattcaccttgaaaggcagaggcaccacccaggtgcagaaaccttccttgggttatgcaacgcccagcgtgggtggaaccgcactcacactttacctcttcctgaaccacagccctgctctgattgcatgatggaagctgaggtgcctgacaagtggaaggaggaaaaggaacattctgccttccttttctctgtaatgccaaagctggcgtcatgcattactgagggcctctgtcagcactggggccggccagtggcacagctgatggggtagctgcactcgctagtcctctgggaaagcccaggttgtttttctggcttagtgttagaggcagctgtgatgtttacctcgatctgtaacatacaaagatctgatcatatgctgtctttgcttacattctattattgtctgacttatgttctaaattctctacaattcccttccatttgtcttaagaaactctaaacctttttttttttggaaatcactacttaatgattttgaggatggaaccccagacagttggtaatagtggatggttttccttttctgtagttgagtggctttctaattcttttgatggcacacaaaaagaaattaaccttagatcacaacttagtacacacatttatgtatgcatgtaactgagatgagttcctcaaaatagcacatacctgtgttttatgtgaggcactgatattttctgttctatattatgcttaactttaaaaaatacttcctgtgtaccatttgtgggactgtaactcacaacttaaaaaatattaccttgatacatagctccagaaatacacatgggtcattttaccaagaatcaccagtgcttttgctctgttaccccggctggagtttggtggcacgatcatagctccttgcaccctcaaccccctgggctcccagctgggggtctttaggaccccagcgtgacctgtgggtagcccttacttcctttaatacttttcttctgcacagtcaggtgctctccctttgagcttccgtgtgaagttcactgtgcacccagctctgctaccaccgcctctgtcttgaaaggaatagggtggggtggtcattggtgtatagtaagattcgaatcacatccttcaagtacagttctaccctaaagataagagtccctgtggtttttgttgttgttgttgttgttgttgtttgaatggatgtgttctttgagaaattgagtcttgagtattttgtgaggacatctaagcctggcgtccacgtcagtgctgacagatttgacctagtgtgcactcccatctggggaaatgcccataggctataatctctttcactggagcgattataatagcccccgggcttcaggtcccagtggcatccacccttggtggcagcatacccctctgcatgaacagggcgcccacttgtcccctccttcttacttagtagtgatttttaaatgggagggtggcagtcctgaatgtagttcatcagtatttaccgcacaagctctaaaggacacagtgttttatttgtgtatttatttaacttttccaatatcggaatatgaatttttgtttcacctgataggacacgtttcaggggctccattctacattgtcatttcacaggaaaaatatttgatggctcattagaagggaacatctattattttgttactgaaaggcacattttcaaccttgagaattggatggcaggtaatggcatggaaattgacagcattttaccacttaaaaataaccacaagaaataccaatgttcaccgaatgagttgaagttaatttggttttgtaggctattgtagttaacttgatgcttgatggaaataattttgtattggaaatcattaaaaattgatttgattaatgcttttataatgttggtatgaggtgttgcactgtggtggtgatgacctaagggtgctgtgatggcctcaaacgttgtccctccggggcccacaggcaggatcccacacactagcacacctcccagttcctcttaccatcaaacagaggtgttccttcaacatgcctgctcctccctgtggcataaaggcaccaggaggttctctgatcccctgttagatctcctctgcagggttgaagacattttttgtttgtttgtttgtttgtttttgagatggagtcttgccctgtctcccagactggagtgcaagtgacatgatctcaactcactgcaacctccgcctcccgggttcaagcgattctcctgcctcaacctcccaagtagctgggactacaggcatgagccaccaagcccagctaattttgtgtttttagtagagatgggatttcgccatattggccggggtgatctcgaactcctgacctcaagtgatctgcccgcctcagccttccaaagtgcttagattacaggcgtgagccaccgtacctggccatttttgtttttaatcggtgtagtgtccctaacctaaatatttcacatggcctgaactttctgtagttttagcagcaatgggatgctttgaaacctagatctctcaccaactacatcttccattgactggtgaaacactagtttaagccaattcattttgaccatgtgcatttttgtgcttgatccctattttatttcaaaaataatttccatctctattcatgtaaactaataagagccttccgtttcctttaatggcaaattgtctcatcttttactgttttaaaacatttttttaacatcatgagaaaacgtgataaaaggtataagtgtagtttcctggcttttgcagtacctcagggaattcggtaaactgtattccatttgaggaaaggaacggttggagtaggaggtagtgtaaagataacatagcaaataagcattttaccagaaccctctgaagtctcatcagactgtgccatcatcagaatccctcccttctcatctacaccgtttaaagccagcatccagtcagaagcccagagctggtaccgccttgctttcctgccagttgctgacatatggcacacagtgtcagttaagggcacaggctgatgggcagcttggccacatacctctctggcttcctatctgtaaaatgggcacaatcattgtacctgcctctgaaggttgttgcgagaactagacgcagccttggcacagagcccacagagagtgagcactgtgtaaagactggctgccagccattagtactgggtgcctgtcttttggtgtctgggcaaagctttaacctgttttatcagtttagaactcagatgtctccctggcaaaacaacacgggcatatagatattttgtgaagttttgttgaagtgcacttaggttaatgattcatgggcagcctttcaaagctatcaggctgtgaaacagctttgaataagattgtcttgtccttctgctgattgtcttttccttcccacattagcagccatagcaggaggaggagaggtggcaagtggccacactactctgctcacattaagcagacaatttatggtcaatattcagtgaatttcttttttttatagtacagttaactgatatttatattagctttaaaattatagcaaaatcaggccaggcatggtgactcacacctgtaatcctagcactttgggaggtcgaggagggcagatcgttggaggtcagatgttcgagaccagcctggccaacgtggtgaaaccccatctctgctaaaaatacaaaaattagctgggcgtggtggtgtgtgcctgtagtcccaattactcagtaggctgaggcaggagaatcgctttaacccaggaggcggaggttgcagtgagctgagattgcaccactgtactccagcctgggcgacagagcaagagactctgtctcaaaaaaaaaaaaaaatagtgaaatcagccaaatagagaactaacaggcacactgcctaattccttgtgtaactgtcattggtgtgagtcactggggcagcgtgattaggtctgtgagctggatagcaaggctgtcattattctcaaggccttctgctgactgctgctcttggtaagacatacagaatctgtgggcacctcctcttaccgctctatgctagatgaggcgtctccacgttgagttgtagtagatacagctaagaaagtaaaagaaatgaaaatctcatcaaaaggattggggctagtctcattcttcatgcatacccaaaccgtggtaactttgatttttttattatccagaatggattgtttagaggagacagatggctttccagttcatcaaattttttcaattatctaaaaggaattcctacgcttggagcaagtcatttcaataaatctcattcatatttacctgctgcttccttttaaatggaagaagagaatgtttttcaagtacacttgaaaaatagcatatgtgaattagaaacttcctctgtaaactagcagagtagaaataagaggccaggattcagcaccaggtaggctggattccttcttaggtggctcaagctggctatggggctggtctcatcatatctaaagaactgcccagcttttacgcattttgaatgtggtggaaccagctgcatctttttatatgagagcggcaaatagtcattgtgttccagtttgcttctcgggtcatctaaacatcagaggccatgccacaagcaccgtaactgagggatatagtgtgactgtggtccaggccagtgacctctggagctgaatcatgacttcccagatgactcccagagcctgagaggggactggtgcgtggctccaaatgattttcacctgggcctctttgaagtcgggagagatacgtgcagtatggtagatgtggagagggagaggcatggtgtgtccaaaaattagcaggacctgatccatatacgtggactctgaagcagtgcacttactagattaaaaaaaaaacaatgtacttactggatttaaaaagtgtgtatttttttgtgagatgcagtttgtaagatgcattggtaactaggccatatactttttccattggctctcagctctcaagaagctctttagtttttagcattggatcagtaaacacttattaaaatgttcccagcatttgtttgccatcttctctttcagctgggcccagctgtgccctcaaaccctgcctgtctcttccctgactgatcatgttctcccagcttctacagaggcttccatagcattgtgcttggtagcagacaccagacagaatctcagccagctcagtccaggcgcacgggctcctggtctcccggggtgtggttactcgtgtctcctcggggccttccgccctccacattccagtgccaggccctggacctttgtctctattcatgataaaacatttttaggaaatgctgacgctcagtgaagaaatggaaacactaactctttgttctcttcctaacagacacgagacgacttcctgggccaggtggacgtgccccttagtcaccttccggtaaggacagtctcatgtttgatgcttcgtgctgggggcgggggtttctaattgtttgtagtcagtgtattttcagagtggcatttcttcaccacggtgaagaaggctgaaatgaagcacgtgtgctgtggccttagtcctttctggaaagtggtcctttcaaggggatggaggagaagctggctgtaagagtagtcaagggtgcctgagtcgtgcgcttgcgttcccatccaccagctccctctcttttctgcacttcagctgctccacctttgtgtatcacatcttacaaaacagacacctccttcactcaggcctcccttcttgtcacttactgtctctgcttcctaatgcatcctccgggtcccatcagatgtttgcactctttgtctggaaccgcacatgccatttctcttggattcctgtacacaaactataatagcatttcccagattttggtgtctggctttctcagtcagcatggtgacaaaagaagagcctgttcattctgagtgaacttgtcagctgggaacacccaccctcgctggaacacgcactgagttagcatgtgtggtgctgccatttctctctgctcaaagtagcggagcagtcgaggctgttgactagtgacgggcattagggctgacacccgaaacaggaggcagggcagacagaatgtgtaggtaggacctggaggccttgagaaaggtggatccccatctcctattccagcttcagttttccggcttgtcccagccttcctcctggccttcttccctgggcagcacaacgacgtgatagaagtagcagctgagagaggaaaggcgaatgtttctgccttacaagggcattgtgttatttttttaaatgctttgtgtgagcaaatagcataaatagtctataaagtaaagtgactttactttatttactttatttaaagctatttaaagctagcataagcttcctgctgtgtggaaattatggctgtttccatatgttaaataccaagtaagctttgaagatgtgttgtgaaggaaggtgatagcaagtaatttactcttactcactcaggggagctgttaaggaagaaagtcgcaaggttccaaaggactggaagtgaaagtgatattcttaaaatatcttgtttgtttctttttaaaactctgaagctccagggtgccacgggaggggcctgcccagggcttctgcgtgagaactactccatgagccatcagaaacctgactgctcttctcaggtcacgttgggaggatgtgactatttcaccttttgtgagcaaagacctcgcatccttctacgttgggaggtcttctgtgtatgttcttcagactgaagctgcgatcctctcacacttttagacagtgttggttgatgggccagctcttttatggacgtctccagccaccctttccctaatgtaaaaaccacatcttggccaggggaaattattttctgagaggcaaatattctaatatttggtaagaggcaaaagtgacatgtttaaaaaccttgctctgacaagctcttttttgagtgagtgagcagcacctggtcttgaaaggttgagtagggctcccagaaaatagaaaaaggttcctcctccgaggccaagtcagtataaagaatagtttagctttggattctgagtggaggcagggtcagtgagccttcaaagaaggaagcggtgcagaggcacagggcaggaatagaagccagccgattgcagagggtagagccgtgaacgcccagagaggaccgagtgcccctagttactcgtgtgcccagagggtaacttgcagtggcgtgcttcacctccatacttcaaactgactagctgttcacagccaactatagtcagagagatggaccacaaagaaaacaaaaggagaggcgtgaaggtatattctttattcatgtggcagtagaacccaagttgcgtgttctgaatgcacgtggcttttgaatccaggatttcaggtgctttcgtgtgtatgtttggtcgtgtgtataggatgctcatggggaaattacagtggcattctgtttgtgtgatagcacacaggtatgagtgtggagagggcgggagcatatgcgtgtattttgtggatcgaattatggatgctgtgttcttgattagtatatgaccattgtcaaggtggattattaacagtctgtagattcaaaatttgtcaaaaccaccaagctttagataaaaggaaatagaccaggcacagtggctcatgcctgtaaccccagcacttttggaggccgaggcaggaggatcgcttgagtccaggagttaaagaccagccttggcaacatggcaagaccctgtctctatagagaaacttaaagattaacccagcatggtggcacatgcctgttgcctcaactgtttagaaggctgaggtgggaggatcgcttgagcatgggaggtcattactacgctgagccgtggttgtaccactgcgctccagccttggagacagagcaagctctccttttgcttttacattcagagaccaagagcaaacttagctgtaactgtaccatcattgacttttcaactgccgttttcacatttgtctgttaaattcagtgcatcgttgtctaaaaattcatatgatatttgataacttgaatctattaattatttagcgataaagagaactctgagatctgtattaacagagtgagatttctggcaggtgtctgcctgttgcaccttcctcttgacttgtcagctctgtctccccttcccctggagccctcagtaacccacctttgcccagccacaaaatctcttcgtccctgggaaaggcagtggggcagagagagctattttaaaacattaagttttcctaaatcccagtcatgtgccacttaagacaaccatggctgactctggaatttaaattttcctagatgaggcattttcagggtggtggtattatttgatgccctgcctgtacttggaggtagctcagctgaccaacatccttttaccccttttgtgtttatggctgatggctggtagcaggtagcaggctgatggttccctctcatgagtgcagaattcaaaatcatggagtttggagggacttcagagacactgattcactcccagtattttccaggtgaaaaagcctgggcccagagagggaggggacttgcccagcaataagcaggtcattggtggtgctggatctgaccctggctctccagcatcattgtgagcctgtgatgtggtcaagggtgtgggcatggggtggattcgcccaaggcttaggtgcttgcagtggttgcatacaagtttcgagtctagggacccagcagggccctctccttccatttgcctgcagaatcctttatctcactctattccatagtgaatgcacctaggctgaaagcaactactctctttcaagatgaaagtactgagtatccagattttcttctgaatgcttttaccctggaacgggggcagcattgtggctattgtggctaatagcactgtttgcagcagtgtgtttaagatggctttccaccaggagcaccctcaaagccatcctgggaggctccactcagctctgctccagggaacaggatcagattggaacctggatgaatgccaagaagaatcttgtagttatctataagatcatcttctaattcaggctagagaatttcaatgaacgtgaactttgattttaatgccctacctgttactgcttggcattgagttggcagtactgacaaatgatatgaacgtgtagaattggccaatgaacatggctagtgtttgttgagtgtgccaggtgcccttgagaactttatagaaaccaactcagttgattggtttgatcctcacaacagccctgtaagttatggttactgccccattttatagatgaggacactgaggccaagagagataaggaacttgcccttagccacttggctctgtaagtaacaaagccaggatgcaaacctaggagatctgccttttgacctgtgtgatatcagtcatttaagctgcatagggtatggacagactcaggttcagagtccctctaagctccgtggttttccctcttcactctcttgcatgttctctgctgctcctagattgctcatgcccactggtgatcctgtaggctttgtcatactgtttgatttcctatgtttaaactgtcctttctccctgttctctacctctcaaagccttcccatcaccctgtattgtattgaactccacatccaaaaccattttgatttccaagtcagagtccgtctgttccctgtaccccaagtctcacagaatgtaacctctctgtgtcagtgaatttgttctgccttagcttctagtggattgttgacatgatggctcttcccttgtaattgtaaccataaggactgctataccatgttgtatccacatgtcgttgacataatattgctctcaaattatttgttggttggcagggcatggtggcttatacctgtaatcccagcactttgggaggccaaggcaggaggacgtcttgagctcaggagtttgagaccagcctgggcaacataggaagacccccatgtctataaaaaataaaaatattagccaggcatagtggcacacacctgtggtcccagctacttgggaggctgaggtgggaggatcacttgagcccaggaagttgaggctgcagtgagctatgattgtgcccctatactccagcctggacagcagaagaccctgtctctaaattaaataaataaatgttggtttaataaatgaaaaaaggaaggaaaaccagcaatagttttcttaataaattatccatttatttccttatatatatttacaaaccttttggtagaaaatattttcaaaatgtatgtttattactgcctcataagaacagtctagaaaatataatttacttcattcaatgatagtgaattttgagagcctccatagtttactacagatcagatgaattgagtgcttacgtgagtacctacttggtgccaggcaatgttcttggcaccggtgatccaatggtgagcaaattcaagtctctgttctcatgggcttacattctggaagtgatggataataaactagtatgtcaacaaatgaacaggtactttcagaaagtgatatgaggaagatacagcaggacgataggatggggggtgataagggtggctgatggtgggaactctaaaggatgagacctgggatctcacacttggatggcaaagtggaaacagccatgccatccagagtcagctgtccagcagagggacctgcctgtgcatgggccctactgcagtacatataatctgcatccatggcagatgaggacaggatggttgggagtacaaggaaggaagagagagactggttcccaatgaggttaaagttgattcaaggccagattatagttggtcttctaagtcataggaaagaattttcagtttattatgagaggagtaggaacccattgagagtttaaagcagagaatgacataaacagataacatttcaaatagcagtgcatacgtacatacatgtgtgtgcatgcacgcgcacacaaacctgatacagtaaatcactggactggtttatctcttgctataaaagtatttgaaattgtgtttaattgaagggtctaggtatttgaggttttactgaatatatagtatttaaagattaatgaaatagtcacacttatttatccaatttcctgctttggtaggaacttcacaatgaacttcacacaatcaaatgaacactgatttctttaaaaatgaacaaatactccacttgtactcatagcttcatgaactgaacctcagcagaaggttgatcggtgctgcttcctggggtgatctctgtgcaggagatagtctttcaattctcttaggctgatgatgtgagattttaatacaaaaaacaaagtttccctcaaagattaaatcttgtatattcttctgtttactccacccatatgtgtctcgagtcacaggcatatagcaaggcactggtgaccgctggttctccgaagtgaatcagctctgtgagactgaggccacaccctgcagttagaaattttacttggcaatgacagctgtaattttgtcatttgtctgtggctggggctggctcctaaaacccggtgtggatagtgacatctagtggatctctagtagatcagttccgtggactgtcaggtaccaagtgaagaaacacattcagcggtgccacattctaaaattcaaaatatattctctgtaatccagttgcctgtatctaaaacatgaaattattaggaatattaaaatttaatttactgttttttccccacagacagaagatccaaccatggagcgaccctatacatttaaggactttctcctcagaccaagaaggtgaggcttgtgggtatgggtgggtggggatgcctgccctgcatgctgtaggtataggtggggatgcctgccctgcgtgctgtggatatgggtgggtggggatgtctgccttgcttgctgtggtgtgggtgggtggggatgcctgccctgcatgctgtggggatgcctgccctgcgtgctgtgggtataggtggggatgcctgccttgcgtgctgtggatatgggtgggtggggatgcctgccttgcatgctgtgggtgtaggtggggatgcctgccttgcgtgctgtggatatgggtgggtggggaggcctgccttgcatgctgtgggtataggtggggatgcctgccttgcgtgctgtggatatgggtgggtggggatgcctgccctgcgtgccgtgggtgtgggtgggtggggatgcctgccctgcatgctgtgggtatgggtgggtggggatgcctgccctgcgtgccgtgggtgtgggtgggtggggatgcctgccctgcgtgctgtgggtataggtggggatgcctgccctgtgtgctgtgggtatgggtgggtggggatgcctgccctgtgtgctgtgggtatgggtgggtggggatgcctgccctgtgtgctgtgggtatgggtgggtggggatgcctgccctgcgtgctgtggtggttggcttttgctgaagacgattttaagtgtcctttgaagtcacaacccttctaaccaattttcttccattatgtgtgcagtcataagtctcgagttaagggatttttgcgattgaaaatggcctatatgccaaaaaatggaggtcaagatgaagaaaacagtgaccagagggatgacatggaggtacgtggagggcgtcaggcctctctccttgccttgagatcatattcatgttttgctttcaaactttataattgaaggaaataaaagtttagaaagcttaaatataaaaaaaagtacatatgtccgcaaattggtcattgatagtctaccagtgcagttatttgttttggttaaagatgaactttttatgttacaacaccaatcctcggagagatttctctttagacaatgccatgcctattccccaattttagccccacagctctgtgaaagtctcctcacacattgaatcctattattgctatggacttgcaactctttgtaaattctttttagccattgaggtcgcttcaaagtgggtggaggaatttagaaaatcacttttttttcaagtttcttactcatttggccacaggtgacagcctgcagtagaaaaaccctcctctagaaatgccattctgcaacgagctgaccagaggaatgtcccttttttccttcctgacagagccgcctgtatttaccttgtcacagactgatgctgtgggtcctatcgtaccttttcagcacacacctcggccagtgctgttttgttaggcaaattctcatattctcaaagtgtccattaaacgagacctctctagggcttattctcacatctgtttgcagctgttgcatatatgtgatatgtgaataatgtgtgtggagaagttacccgaacactcctccgcctgagagatcatatttccaggcattatttcatttacaagccttcatctctctatatacatgaagaggaataatgtgggtgatagaaatttatgaatgttaacatttcataagcatgtcaacagattttcatctcaaatccaaggaattttttacactcttcttgccttccaaccgcagtaaccagtgaattacttaattttccagtgattttagcagaggatgttaggaagggaatacgtaatgcctaaaatacgtgctgtaaaaatggaactcgaattttggtaccatgaaacccgttggtgtggacacagccagtgtagagggcctgagtagaaggcagcagcttccagactcctggctcctgcggttgtttgggatgcaaagaggaggcttctctctcaaagcccacctccctggggagcaacaggactctgggcctctggtcccctgtgccatgagttctgttagaacacaggtgcagcgcagctcatcttccctgctccctttacctcatagaggtgttgaaaagatggcagctgtactgtgacgcacatcattggcagggctttgtacagccttggaggccctccagtcaaaataacaaacatgacgtatggaaagagtatgatgtgacttaagtagtgtcaccgactgtgcagatccaaattgtgttgtcctgcaatgtagtcatcttagagggcagcacaattaattggccattactcagaagatttttgaggcctttctagaattgatatatatatatttttttggccttcatttgggaatttactcaaatgtggccccgaagccatggctagagccagagagccccagagcaaggagaagggcatgcagggcatgctgtgatgacctcttactcacagccgaagaaccaacctcataatcgtccctttaactttattccgcagcatggatgggaagttgttgactcaaatgactcggcttctcagcaccaagaggaacttcctcctcctcctctgcctcccgggtgggaagaaaaagtggacaatttaggccgaacttactatgtcaaccacaacaaccggaccactcagtggcacagaccaagcctgatgtgagtaccgtgtgatggtcaggaacacgtgcacgtgcactgcacagctagggacaaatatggcggccctttgggacaaggctgggaaataaatcatatgtctataagagcagatggtggtgtggtacgagattcctctccatttacgtaaagcatgcaagagcagtcagaacttgtatattgtaagcgattgcctttgagtcacatgctgctgttttcaatatgagctgatttattttctatgtcttcttttatgtcgattcctgaaatacaaagcagaggttgtttttcttagacttattttacatttgttgattatattgttttcttcttcacctttctctcccaactgacccagaacagaaccggcaagcaaattggctttgcaattttctgttttctctaagtttttggatgtttactctcttcaatgcattgatttggaaacctcaaaaatttttttttctttaaggaaatttgagccccttaatataatcagaaacacatgggagagttgcaaaatcagaattagtaattactgtgtattttaatccctcaccagcctcagggatgcagtaaaccaattcctgttttgttccctcagcaatttgtggtttgattgatagcaaataaacactggttaaaactcatggactttaaaaatggttttgtagcagcttgtttttaaatcattttatacagcaagatctaagtctattgataatacatcgaagggcaaaaagaaagtcttaaggaaaaggaattttatcctagaaattatgagctgcctagcagccaagacaaggaggaaattatcaatgaactatacaactttcagtatgtaataaaagcaagtctactgggtagtataattttcttgtctactcgaactctgaaagaaagtggctaatgatacattttagacaacaagcagtatgaggtatcatgttcttaaaaaccttttatctttagaaattgtaaagatactccacatatgactgtgggtggggagggtggccaagttttctggtctaggttttgtttaatttagagataaagcttgcagaatctggaacaacgaatagcctgtcttctctgagcccccaggtgggttctcgtgaatgtcagctgttcgtgatcagctttagactacccagcacgggcattagctcaggacagcaaaatggtctcaggacagcaaaaatatcagatcagctgggtaatgctgaactatcttttgttaaagttttttcccatggaaatagcttggttgattctttttgttttttatattattgcttactatttccttttgattaatgcccatagctattagaattattgtaatccattgtagctatttgtagtaaaaatgaatttggacccaccttgggcttggttacatgtagtgactagaagaatcttggtagcaatatcctaagcaaagcaccattacctacctttgctcaacagcatgagaaaggagtactgaaaaggtagatcctcatgcgacctctgcagaaaagtggccaggagcaactcacaaaggaaaaaatcctgatagctaatatgtatatggaaaaatattcaacttcataaataaggatcatgcagattagagtttgtattttggggacaaatagggataattgctactttctctgcctcacagagttgtgaaactaacgagggaattcttgagaaaacacttcatacattttaaaatatatactatttttttgatggctccacaggtgtagacatgtccccacactcatcaagaggtgtacgttaaacatgaacagctttttaatgtgttgattagacctcaataaagtgatttaaaagagaaaccatctttggtggcagtgtcccagaaactaaaacaaaaggtataacttgctggctcttcactagtctagagcaacaagggaaaaatgcagttctttttctgttgttgtttgagacagagtctcactctgtcacccacagtggcaccatctcggctcactgcaacctccgcctcccaggttcaagcgattctcctgccttggcctcctgagtagctgggattacaggcgcccgccgccatgcccagctaatgtttgtatttttgtgaagatggggtttcactggcttggtcaagctggtttcaaactcctgacctcaggtgatccgcccacctcagcctcccaaagtgctaggattacaggtatgacccaccacgcccggctgaaaaatgcagttcttaatccaagttcgggctcacatgtagttttgggagaaggcagaggcataactgccccatcaaggaggcagcaatgccaaagggagaggctgagccaggaaggacacagcagaacttggcagaacctgaggagcgcctccttccaatgggcataacttctagaaggcaagaggaaagttagttaaggaaaaagagtttccaccacaacctctgctagcaggccctttattgggatacagtataagttcatttcagaatgtgtgagaaaactttaaaatttgtgttttagaaagagtctataatgagtgttcttgataagtactatatttcagttagtctgaaatgacgatttcaacttttgagatactgacttgtgacataatttttgttaatgggatatgttatcttattgaaagtatctgtgagagttttccctgaaaaaatttttggcatttaaacttgtacactaaaagcctctgactagtatttcccccaaagtatgattgcctataatttactgcaaaaaaaaaagttttcttttttctttttttttttgttttgttttgttttgagatggagtctcactctgctgccctggctagagtacagtgacatgatctctcagctcactgcaacctctgcctcctgggctcaagtgattctcctgcctcagcctcctgagtagctgggactacaggcacgcatcaccacactcggctaatttttgtgtttttagtagaggcggggttttgccatgttggccaggtacgtcttgagctcctgacctcaagtgatccgcccgccttggcctcccaaagtgctgggattacaggcatgagccaccatgcccagcccaaaaaagtcttccaaattgaatcaaaacttttagatcctgaattgagaacatcacatgacaaaaaatagggtatgatgttttggtgttcttcagaccccggctgacttgagaggttatctcctgatgttattaggatttttaaagtagggtaaaggaggtaaatgcagtgtcacgattttgagattctgttaaaatgagctagaaagcagctgaaaaaaattcatgttggatcaggtgtactttcctccagatgacagctttgaatttgtcccttttgtagtctttggtcaaattgctggtgaccagaagtagctgccttgtcattgctggacttctagaaggattgggactgcccagctgctgtgtgaacttgcctgtcacctctgcttccagaggtctgacttgtcactgtggcaaatgggcagaggactttgatttctgttttttattaaacactgaggtatattttgaaatgtatgcctgaaagatgctcaaaatggtgtgactaatgcattttaaaactgcatttatttgattgaaatgaaccttaacctatactttagccgtaatatggtgggagaattctcacattggatgaccagctagttgtcagtgtttgacgctgacactttagtggccatctggccctccgtgagcattgaactgtcatgaagggcccgatctcaaccacttctcttcttctctttccccctttcctgcatgctcagggacgtgtcctcggagtcggacaataacatcagacagatcaaccaggaggcagcacaccggcgcttccgctcccgcaggcacatcagcgaagacttggagcccgagccctcggagggcggggatgtccccgaggtacgatgtccccagaatggtgcaaagcccggcagctccttcttcccatgttctccagcttgattttatatcataatttcttctgtcagtaaacattgttgagaatgtaaagattacagtgacgcagggaattaattaccatctgaatattaatttgaaagtgcctataaaagccgtatttgacaagtataggtggctctatattatagaaatgggaataacattatttttatttttattttttttgaagacagtgtcttgctctgtcgcccaggctagagtgcagtggtgcagtcttggctcactgcaacctccgcctcctgggttcgagcaattctcctgcctcagcctcctgagtagctgggattacaggcacgcatcaccacacccggccagtttttgtatttttagtagaaatggggtttcaccatgttggctaggatggtctcaatctcctgacctcgagatccgcctgctgcctcagcctcctaaagtgctggggttataggtgcatgccatcacaatggctaattttttttttttttttttttcctagtagagacgggtttcaccatgttggccaggctggtcttgaactcttgacctcatgatccacctgccttggcctcccaaagtgcttagattacaggcgtgagccactgtgtccagcccacattatttttcagtatgaaaatcttaagatatttttagtttgtaatttatttttcacaggggtctaaccatgtctcattaaatgacagcttgtttttatcatagttgagctgttgaatgagccctgtaacttgtttgggtatcatatgcatatttttattgagtcgctttgacacttggaagagatttattaccatgaaaatataaatttaggtgaacagaaatgtgtaattttccctttaaatagttatggtatgttacttaaaacgttatgaattaaacaacaaattagccataatcttccatgctatcttaccagctctgtttatgtactaaaaatccattcttcttagacattgtgttaggaagatcatttagaatgcggcgattcaacttggaaaagcaaaagtaatgattccataacacattcactctaagttattttataccattgtttaattacagcgtatagcttctatgctgctcccacggtgaatcctcagtggttaaaagtaaaagaaaatccatgacaattgtttataaactccagagaagtgtgtgtgtgtgtttgtttttttgcccacacatatagtaacaagtgctggaaatcagtcactgttcagagaggcattgttataaagtggttaagagcacagcctctgtctggaaccaggcctctttgattcacatcatggccctaccacttgctagatgttaccttgggcaggttattttctgtgcctcagtttcctcatctgttaattgggggagttatcttcctcgtgattattgtgaaggttgtgtgcctcatgagaggcacttagtaggtgttaattatagttatcaccggggctattgttgttacatggtttcattggggagctgggtggatccctacttctttctagtgtttaccccagtgtctccttctctgaaagccttgggagaccatttcagaggaagtgaatatcgctggagactctctcggtctggctctgcccccaccaccggcctccccaggatctcggaccagccctcaggagctgtcagaggaactaagcagaaggcttcagatcactccagactccaatggggaacagttcagctctttgattgtaagtagtggccttgtttgaaagaaaagctgagcaatgttttattgttttttgttgcttaaggagaatctcttacgtaaatagtgaccaagggtcttccagctcccagctaactctgacattttccaaagttcctccttccctaggagaagcaggactgtactaaaattagcccaagcaggtgagaatctttcttgatttggaaggcagctttgctcacccttataccactaacactttcttggtttataaagaactcaaagaagtaaaactccatgatgtctgtaattattagctttaaccttgtagaattcctttcccagccaaaaggctcatgaaaatagtacctttatcacaaaggtagtatttcacagtaacaattaaaagccatcaggcctaatcagtcctcttaagtcatattctgcaggatttatcattctcatttcgctgataagggcacaatgcttaagtggctcatccaagacaaggtttgagtgggagatagaagacgtctcctaagtcccagagtatgaacccttgagaaatgttgtgaaattgtgacactgtcatcaaggtagcattttaacttgggctctcaaccatcagaaacatactttctagaagcttcagatgggcccaatgcctgagcccaatggaatcagtcacaaagacttccatgtttgacaatacaaaactgtgcagaaataacccatagaaaatccctgcttgtgcatagaattaagagcaaatgaagtctcagtgtttctcaagaaactgaacttaaaaatgtacaatagtaaatgatgatagtcactccactgaaaatggcatcctaaaaaaaaatagtcattactatgaccataacaaacataaatgatagcactgcatacaatgtaaaagcaagtaagtactcacaaaattgttactttttggttatggtgtttttattttaaaagacagtatacgcctctattacatgagttgcatttatcattcagttaatgtgatttcactttgaaattctgtgactttttcaaaaagagatgtgtcgccaagatgaaaatgtagtactaaatggacaggataaaagaaattgcatatatatgggatatttgaactgataaaactgttgttatagaaacaacataaacaatgaagccttgtatttaaaacctataaaagcaaggaggtaccacagaatccatggcagtaacacacctttagtaaaccaagtaaacactgtaatttttttcagcaataatcataagttagcaattctaattatttaaatgaggagctcctgaatttaattattctagatctgtgaaatatcattaagacccaaatacaatgttgtattatttcacatcgtgttcactgttaaatgagagtcaaatcggatatttgctcattgggattaccctgtattcaaggggaagaacatgagctttggctgggcacggtggctaatgcttataatcccagcactttgagaggctgaagcaggcggatcacctgaggtcaggagttcaagaccagcctggccaacatggtgaaaccccgtctctactaaaaatgcaaaacttagccgggtgtggtggggtgcacctgtagttccagttactcaggaggccaaggcccaaaaatttcttgaacccaggaggcagaggttgcagtgagccacgattgcgccactgcactccagcctgagcaacagagtgacacttttattaaagactgattctttcacagtaaccaatgtgggaagatgtgaattgtcccccatccctaccacagagtcttcttgtaccatttacttatcacaaaatattaaaaatgagtaaatactagaaactgatactatggatgaacttgccgataaggagactctggcttctgtgtgtgacctgctgctaatcttcattcatatcaattaggcttcatttaaccacatagactaatacaaacaagttagaggaatattaagacactacacagtagatctttttttttagcttgatctcactatttttaatcattcctgtctttactacttgaagtccacttagaagctaaaattggctgagcatggaggctcacacctgtaatcccagtactttgggaggccgaggtgggtgaatcatctgaggtcaggaggtcgagaccagcctgaccaatatggtgaaaccccatctctactaaaaatacaaaaaattagccaagtgtggtggggggggcttgtagtcccagctactcaggaggctgagacaggagaatcactggaacctgggaggcagaggttgcagtgaactgagatcatgccactgcactccagcctgagcaatagaacaagactctatatttaaaaaaaaaaaaaaaaagcagctaaaattataaataccagatctttcagaagtaggccaagatgatgtctgagctcctctgaatataggatgcaactgactctttttcaattgtagtaatcaataaatgttgggtagccacatatcactatttcttccgtctattcacatcacattaaaatttaccctgagggtgcatcttagagcaaactacaagactgctagcttctttctgtttgtaaagcagcattagagtgttgcagagtcctgttgagtctcctttctgaaagttttggtctcctcttacttttgccactaattctaaggaccaatcaaaattccagtctgcttaactgaaaattaaagtgaaagataactttttcaaggatgactgtccttgctctgaaaagatgtttcatttaattaccttctaatatcgaagagcggtgaatatggttgagtgatatgtttgttaaaccaatgaaagttgcttttaagaatatatttcttgatgcttcctgtcttttcctctccttccagcaaagagaaccctcctcaaggttgaggtcatgcagtgtcaccgacgcagttgcagaacagggccatctaccaccggtaacccatgctaatttccagtcatcagttgactttttgggctttcatttacaatcatctgggctgctgcaaaaagagtttttcctgtgtaaatttatttacaatataaatgagatgtttttaaatttcctggccaattgccctaggaaagtggatttccaatacagagaattgttactgccacccatctctaaaatgctggaacctccattgctttagtttttcacccaaatttataccaattttgatttgctcacttaaacctcttggtacattagttagtaattccttttaccttattgagttactatagttatgctccagtgatctgtactttgaaaacacattgagtccctttaaccaggaagaactcttctgggcgaccgtccacatgttcctttcccttcctaatgacctgaagtctgaactctacagagcctctgtaccttctctttaaaggcagctctgctcaccaggaattggctataattctttccaactctctcatcattttaatagctatcagcaaatgtagaggtgtaggggattttgtaacatctgatgtatgtaaaaagaaatattcaagttggaaggcagactagaactgccctgagagatgtttgatgtacacattaaaaataagaaattttacataaatttgtttcttcttttggaggtgaaaatatgtggttttaatgtgttcaatttgatattttaccttgacagtttttgtctgttgctacaaaaccttgatcatttttaagactaataatgtattacgtatgaatttgaagggggaaaagtgcatttaaggtttttgaaatcacagtgtcttccctctcatgtatgttttttcttgacttcaaaggatattttggcctaggttttaattttttatgtttgagaaaaaattaatgagtatactagtcaaggaagcagtcaaaataatagagtcatttgtgacttacactggagagacttaataataagcttgataagagcgtcttttctgggatggtttcagtacagggctcccaaaaacaaaataatcaactgagatggactggtaggatccttctcaacctcatgatctgtgattttccttgaacgaatggcactttctctccttttcaaaatcaatgtcaattttatttcccaaagaactcactttcctggaaactggtgattcctccctctttctttgtactttctgatgctgtaaactcactgatcaccagtggcctcttgagttttgagtgtggggagatttcagaatctgctaattatttgacaatggcaggcaaaaccagaccagctttccatttttctctaaggcagctcactcttttgaggttgtcattgtttacccaggtcaaggatgagccaccttggggggcataggggtcacgcttcctttgtgctactggtcatcagcgactgctggctttgtctggatagggtgggtttcagggattctgatctcacgtcacctgccttacagcgctgccacagcagtgggccctgattcagacagcagggggtcatcccctaagtgcatttcactgatgtaaattatcattcacagcccagtgccccagctgggagagcgcgttcatcaactgtcacgggtggtgaggaaccaacggtaatgatccactttatcagacatcaatagcaagaggccgtgaggcagttttaatatttcgtgtagtggtgaatatacgctgtttttaaaaataagattagctcctttgtgctacagagctgcacacgtttcttattttaagcttctcatttggggattgtttaaaggtactgggtaaaatagaatgatttttttagtcccacataattttattaggaatactatcaggctttggttaagtgcatttaacttgaccatttagaagatatttttgacttttagtgtttgtactcctgataagtttttccatttcattagaatgcttggttaaagtaatttggttggaagatcatcaaagaagccacaggaattgcatgagactgtgtgtgtgattcctggatgtgcccagggcccttctcttttctgtatctcccctaccacatttttcacagggggttagacttttcttgtccccagaatgcaccatgaccctttctctgccaccaggggctctcctcacacaatgaacaagtttccgtaattccaagggaacataattaggatatataagtgatctagaaaaatttatgtttctctaagccaaccattcttattcattattttaaagaatgtatggtattcctgtctgtgggtgacttagatttgtattttaattgcctgttttctacttgatccctaaagttaggctagcttatagtttatgcttcgcactgcaatagctgtttaaagaatttcctggccgggcacggtggctcacgcctgtaatcccagcaccttgggaggctgaggcaggtggatcatgaggtcaggagatcgagaccatcctggctaacacagtgaaaccccgtctctactaaaagtacaaaaaattagccgggcgtggtggtgagcacctgtagtcccagctactcgggaggctgaggcaggagaatggcgtgaacccgggaggcagaggttgtggtgagctgagatcgcaccactgctctccaccctgggcgacagagcgagactccatctcaaaaaaaaaaaaagaatttccttattgtttcacctgtgttgtattttgctataactgctcattacttgtggataactttacgtatacaattgctgattttctaaagatgttgatgacttcaatttaatgctcagcattgtacagaggaaaatcaaactggcaacagtcagccccagaacactcagctcaggttaagatattgagctacagtggtttacatgagtcatgtgttgagtgaggcagcctccagtagaattcaagaaattctacatgaactattacccaccgtgcacttgtaatttctgtgggagtagtggagctttgagggggacaagatcgttttgtgagataattttagttgaattcagtgctgatgaacatcatctgtatatcacctatttttgtattttgttggccttgcaacctgcgtgtagctttggagtgttgtggtagctgatgtagtaaatgaagtaggaatggaatcattgcagtaccaggctccatggcaagggtcacctggcaggacaaggtgacccctctgaatgagatcccgggtggcacgttagactgccattttcttgccttcttgcctgcactctcccctccccgtcactgagtttcagcatgggttgggtgttttctttccacaggcttggcaatattcattcctaagtgtttcatctactttggtagatgtagatagatctccctacctacttaggtttgaaaggatcacatccatttctcttctgctgtatcctgcatgtttctcttccacatcctttgtcgtgaatgcccttgacttcctgtcttgcaattctgtctcttcaccccgtgtttccctctttggcatcccctctgttcctctgcacatcactcacactgaagtgtattgtcctgggctggagccatcatggtattatatcatctcactgcccctgtgctctcacagacatacggctgtgtacacataggtacacattgtgccactttattttattttttttaaatgggatgtcatgtatacattacttagcaacttggtttttttttaacttatgttcattcttctgggacatgttaataattacataatattcactgacgtaaaggcactacagtgttaatttcccgacattcaaggactttctgctccccctaccctgccctttcaactccatacgctgtgctgaagtaaccgtcctgatatagctttctttctatgatagtgctttcattcctgtagtctaataaacaggccctgattctcagccaagaaaccacagccctttgatttatggcaaataaacgcacagtggtgtcactttctggcagactaagccagggccctccccatgagataaaaggagagggatagcacagtcctttcagtctttgttgtatatattctaaaaatacacgagccaccattactgggttggtgcaagtcttggcaaatctgtgatggtcagtgtcaaagtggttatttttaaaagcatattgaaacttctgcagtttacaatcgtgttctttattttaatgaaagaaacagagccactaggaagttctagctaatggcttttgggcatcacaaagcagtagtgtattcagtctatgatgaaaagctgtgaaatgttaaactaagtcgccatttctaactggtttgattacttttttgttaagctagggtggaacatgctcacaagcacagaacagcagaaggctggttttggcttcctggcgggcccttccatggcctgtctgtagaagctgagtcctgccccctcaactagccgtgcagggtgggaggcagtgtgagttacaaatggaatcatcagcacaagttgttctatgtggtcatttggagagaacactgtaaagaaacatttccaaattgccctctcacataaatgtaactaaattacaggttgccagttcagttctcaatagaagagagaatgagcattttaatcaaattcagcgttctgtactacactcctaattttccacaaactgattagtgctattcactgtggctgtatgaaagtaacctgtatggccaggtgcagtggctcacactggtaatcccagcactttgggaggctgaagcgggtggatcaattgaagtcagcagttcgagaccagcctgaccaacgtggtgaaaccctgcctctactaaaaatacaaaaattagctgggcatggtggcgcttgcgtataatcccagctactcaggaggctaaggcaggagaatcacttgaacatgggaggcggaggttgcagtgagccaagattgtgccactgtactccagcctgggcgacagagcaatactctgtctcaaaaaggaaaaaacaaagtaacctggttgctagaattcatacagctttaggattcagttctgacatgatctatgacacatccatgtgctttcagttgatcagttgcctcccaagtgtcctttccagagattgagtaactgcaaaaatatccttaaggtttccagagctaaggtttccggagctgagttttccaggggcggggccagggggagtggggagttatgggagggaaggggcctgggagagggggaagtggatcaccagaacggctgaaggggagggctctgggcggagggagctgagaatgtaacacattccatttagtatttcattgattgtataaacaatagtaggtcaaaacttgatagcacatactttgccagagatactaattgaccaggaacttaggttacaacttagctcagcaggggagtccattgaagtgcccggatccacgtagctctttgtgttggcatcgctgctagaggaggaggggaggaaggagcttcactcaggctgcatgctaattcatcgatgtttaatattcatgaaaggattaagtcagtgttgatgtttcttctgctcctgctgagtctccacacctggatccagaatgctccatgatccgagtctttgtgtctttataaactatctttagggagctttaggactttatctcgggaaatattaaggaaatggttttccttaatatcagcagaaagttttcttacacataatctaaaatcagctgcttcatgatcttacccaggtgatctttctctgaattgtgcttttaagcctgggaggttaacatactgcttctctgtggatggggttttcaaattacccggcagcatccttgttggtgctttctctaatttgagatcctggagtccaccagggaactccaggtgaccaccttcaccaagacacattgctggtagtgcagggaaaaggtggcataagcacaggaagaagttaggttcagaggaaatttgtatcctcagcctaatagcaagaaaacgacaactgctaaaatatctggaagtaaaagaagcagcttccttttgtaacctcacgtgagaggttattcctaaggcatgggctcctcctatacctttagattcccctaggagccgtggtatagctgtggtcggcttctggtttctgagcttttccccacttagagctctttcacaggcacagatattacatgcatcgcctatgcattcaagccctcctgggacagccctgatctccagcatctgtcccagtgcctccatacatcatcaacacatccttgtttttcagtgtttctccatccacactgcatttcttagactgcttctcagggatcttcttgtgatcaaatgtggactgtctaaatacagtcactctatgcggggcaggtctctaaacccaaaaactgccaagctgtgttcaccttcaaagaaacacactcctatcagcagacttgggtgcacatagcctggggtgtgaggctgggtgctgggagacttcctgagctggggcacacagatgtcctgggtggtcctccagattatatgctactgtgtgaccatcagtatcctagagaaggggctctgtgttgggattttaaaattttgccccagaagctacagtgttagggtcctaagctgatggaggaatgtaggcctaagctagaagagcaccccatgggagctacatcgaggagaaactcagagcatccctctcatacacagtgacactggacagtttgaaatacctttaagctctacctggtttggcagtggaatttagtagctagaacagatgataatgtttttccctttccctgtgatcaccttggcagcaaccctttacgtttgagactacggggtcttagaaccaagttctgtaagaatttggactctgcaactgtatggggttcatttcacagtagatttgaagctgttggaaatctattgctgttttccagacacttgtaagtgttttctatataaatagatctaattaactttgtctagagaaaataattatctgggtgtaccttactttattaaactgatcagaaaacaaatgcaaggtattaaataataatgatttcttgcacaaacagccatcagtggcctatgtacataccacgccgggtctgccttcaggctgggaagaaagaaaagatgctaaggggcgcacatactatgtcaatcataacaatcgaaccacaacttggactcgacctatcatgcaggtacgaagattgccatccaacttaaaaccgcaggccatagaagccgaaatgtacatgaccgaactcctttcctggtgtttatgtattgttctgaaagacccgtatttgtaaaagctttctcacaaagaaaatgcattactttaaatacaataatagcctaaggaagaatttgcttttcaaatcagtttatcactgaatatattttaaaaatgtgacgtgaaagatattttcaaagtaagagcctattgcagtgtgtagcttcttccctgcccagcccccactttaatccgaggctagtttttatgctgggctagtgattcatttttatttcccttgaatgtgtttccccatcctttcccccatcattatgtttaattatttcctccacgctttaaataggccagacctcttattattgctgtttgcgttgttgtttgggttcgcgctcctaatcacacacaccgggagatcctcctatgaagctaacttgtttttgcctccaaaatagcttgcagaagatggtgcgtccggatcagccacaaacagtaacaaccatctaatcgagcctcagatccgccggcctcgtagcctcagctcgccaacagtaactttatctgccccgctggaggtgagacggctacctcatctaactggactcactctgtcctgtgactcccattctttcttctctcttaactctgccttcagtttcgcagccacctcctctctctgatcagtcgttgtgttggtagtgaagggtgttcttgtgcagcctttctacctgcttctctgtctcgcccagttaacattcctggactctctcacctgattctcattctcatttggctaaggccgtggtgacttgtgctggacgtgggcactctcttttcaggacttccaccgttcttgttgtgtttcgcttctttttgcctgttacctcattagaattgcgtaatccctctttcaaataccaagtgctgatattgagtttttaaacatagctattgctttgatcatttgtttttctttcgactgtagggtctttcattctatgggcatacatgtttctgatgcatatttgcatctctgcatcatggctgggcatctgcttgtgctctctgtcgtgtttgtgttgttttggtgccatcctttaacatcacaaatgtcagagttagagaagccaaagagcaaatgtttgaggtcctaagcttgactgtgtcttagagacagctgtgggcttctccacgccctgggtccagatgctgataagtgggaatggatgctgtctcttccacactctgatatgaatgtcatgggtaacaactgtgagattccagatcgttgtatttattgatgtagcttttttcctttttgtgctctaaaacttgccaatctgttcttcattagactgtgagctcattaagagcaagggcacatttttctccactctgtaaaatctccatccataatgcttagtacagaacagtatttttggtacatactgagtagctaccaaaggatggtggttataagtacttaatattgttgtgtgtttatccaacagagaaaatgtaaagttagattgatttaaaagtaaatgaatgacagaaaacaggttttggggatcttccctcttgtccatctccaaagagaagccttctgcaatacccaggtacattttggcacattggaatcgcacatgctaaagagttctaatcctcattgttattctttagggtgccaaggactcacccgtacgtcgggctgtgaaagacaccctttccaacccacagtccccacagccatcaccttacaactcccccaaaccacaacacaaagtcacacagagcttcttgccacccggctgggaaatgaggatagcgccaaacggccggcccttcttcattgatcataacacaaagactacaacctgggtaaggctgctgcttttatttggctccattttcatcatgaagtctggcattaattccttgatttccttagtgtttgtagttcttgcagaggaattggattgactgtaaagggtgtctccagagggtctcctcagcctgcatctggcccctgcataaatgggcgggtgggagtgggtgggcacaggctggtagctgtctttggtattggtgctgggactgccttttctcctgggaagctctagtttagacagttcaccgtgctggatggaaaggtattgctctgtgctgttaagattttgttaattgatcccgtctcacaaagtaatctcactaggagttataatcattttcaaataattttttcttttgtcagtttcttcttgcactttcattggcattacccaccttcttttgatttgtcgctttagtttttaccgttcacatcagatcagtattcacacatctgaggtacattttcatgcccttgatcatggggtaggggatgtactgagtgactttggttgtagatctgatagctcctttttgtgatcattttgtcaaaattgatttttcttaccatgcaactctttcatgtactcctgaattgtacccaagaaagaatctgtacattgtattatcttgagcaaaatgagattaatcaaaggcaaatatgcatatctttgtatttctgtgtcagttctttatttctttagccgaatcggtggctttttcagtgtagtatatgattcttttaaaagtcagttggtattttcctgctatataatctctatacctgtaattacactgaaaccggttcccgtatttctggctatttttgatgctgcagatggtttttcttccggttatgtccccatcgaattgtctagctagagttaactcagagtttaacttggtcctactattatctgtgctacttgctcaaaactgatgttatgggaatgctggttgagttttggtgattgttattggccctagctcttcggtcttggaccaacaataaacatacaccattaattcccatttctagtgatggacattaagtgtgtccatttgatagaccagcagccttatattcaagaacaagccctgctcaaggggatttgggctgtcattttatgccttgcccattgtgtggtatcagttcagtccagcaggtctagagggcgtgctcctagaatcctttgaaccgtgggacattgtgtcttcaagggcattcttggcatttggggcagggacatttgtgccttcagttgcagactatttaacaaacttggcttctgctaccaggtgctaatggtcaccattacccccaccccaacatagtgatgaccagaaatgccctacacatttcaaaacagccctaagtgagaaccactctaagagctctttctattttgaagtaagggaatggcctgccaagagaatttctcatttagatctggtaacattcatttggtaaactgataactgcttctaaggcatataataacatgtaggtttgactcccctactagtctgaagataatgttacagatttgcaagcaagccaagagtaagagacgggcagctcgttggaaaatatagtaatggagttctttttttttatgtctttttacttattaccatggaacccctggctgtcctgccagtgttctcatttactatagcactgctgtaatttcaagtccttagccagaaacaggctccagaaataagggctaacgaatataaaagtagatggattagtgtaaggagccactgtggcttgccaacataagctatgattttagtaattttaactagcttggtaatcaaatcccctaaccttttcacagcctttcaagccacaacaacagtgtaattgcagctgggcagattgtattttaaattaaacagcactcgctttatttattgcttgcaacattgctgaatgaaacccatttttactttccagttgcgcctgtttacccagatacttgttattgactaatttactgatttaaaatcataatctgttagaacaacgttttgttgctgctgctagtgtgggaaatcctcaaggtaacaactggaaattccacaagctactccccttcttaagcgaattcagatgtgctgacacagctgcgctatcgcttctaaacaaaggcctaggcaggattttccctgcggaagacacactctaaattgcctgttcattttgacaaaagatgaagagccggagggaagcatgaagataatttgcaacttaaaaatctgttttgagttggttttagggtttgctttgttttttatttttgaaagaagaagagaacaaatgagagaacagcatagctattcttagatttgagcattagaatagaaaaaggaaaaaaactggtaggacaggttgaaaatgatgaaaataacactccttcccccatcggcctgggcactgttgattcttacaccaaccagaagcctgaaaagtatcaggacatttcccctctatacattgagaaattaaaaaatttattgaaatatgtcatgaaagatgaccttttacacacacacagatactgaaggcagtatgccatcagtatttggataaagtttggcctcattctcttttttttaattattattttttttgtttttgagacggagtctcactcttgcccaggctggagtgtaatggcacaatctcagctcagtgcaacctctgtctcccgggttcatgcgattctcttgcctcagcctcctgagtagctgggattacaggcacatgccaccacaccagctaatttttgttgttttttgttttttgttttttttagcacagacagggtttcaccatgttggctaggctggtctcgaactcctgacctcaagtgatcctgccgcttcggcctcccaaagtgctgggattatgggcatgagacaccctgccaggccaagtttagcttcattcaaagaaagaaagaaagattggctttgttccccgcctgggtcaggcctttcagggaatgcatgctggagaccaggggcttgggagggatgtaccaaggagggatgttccatcctcagcagctcagagcacgtgtatacgggttgagtatccctagtttaaagattcaaaatccaaaatgatccaaagtctgaaaccttgtaagcactgacatgacactcaagcaataaatgcttattggagcatttcagattctcagattagggatgctgaagtggtaagtataactgcaaatattttgaaattcaaagcccctctggtccccaagcattatgggtgagggatgttcaacgcatattagtatatttgtgcctttcacaggatgaagcatgggcttgcttttgtagcaagaaagattacaccctagttaagttgcaggtttgttttccatccaagttcaaactaatgaaacttattactctaggtgtggttgctggtctcttccaggatggaaaagataaagaaaaaaggcacttttttttaatccctgtgttttatatattttgaattaggaaagccctttttaaaaagatactgctctttgcatcctgtttaaaaacactttgaacttgatggagggaagcaattttatattacacatgaaagagttcccgttatgaaactgaagaaaggaagaaacaaccaggcacactttatgcgttggatcatttattttcattgcatcagagccctcgttagtattccactttctcatcagctctgaagttgtccataactaatagagagccttgaccgccacttcatgtgccctggcaactaaggagagatgcctgcctccttgagtggctcggtgggagtcagggcttgagggtgaccactagccttagccctcagagctgattcatggcagctgctgccattatttttattatttttgataaaataatattataagcctcaaggcctctggccctcacagtctatgaagtctaggtttccatgcaaggccactttagcagatctttgaaattcggttgactttatacttcatgctctgcccctcactgcctccctgacacttttctctaatttcagcttcttttcacgctacggccccccccgccccccccccccctttaaatcaccagccttttaccaatagggctgattgtctttcacggtagcctacatgtgattccaaggtcaggctggccttgtgtgtagcattcagaagccctgccctctttcatgtaatagcagtcctcagctttctctaaatctggcatggtcataggctaggtggaagcccaagggtcccccgctggttgtggcgttacctggtccggatcagagttagcattgagtgggtagcttttgagaaattcagtgctttcagtttttcctctgtctgtagttaaccagtcatgaatgtttaccagattatcagcttcttggaccttctcaatcctaaatcagcttagcatatttctttatgttctgtgtatgtcagtgtactgcagaatactggattattttgtgcctctgcttagccttttaaaaaaatatattgggttcagggtcaatatgcatcacaaactgctaacaggatttctttcttcatttaaaagttcacctagctagcaagaagcaagggttgatttttgttgttcgtggtcttttttgattcttgccagttcccaagatctatgattatgattcagtgatactatgacttacacggttgacttgggaagcagaaaaatctagtaatttggcagcagcaaaggccctattataaaattgaatgaagctgatatcaaatgtcttcacagtttactttttttaatcttaagcttatttggttgatagtggttttttttttgagtataaagatatggattctcctttttatgtttttggaggcaagactcactgcatcacccaggctggagtacaatggcacaatcacagtttacggctcactgcagccttgacctcctaggctcaggtgatcctcccacctcagcctttcaggtagctaaggcaggcatgcaccaccacactcagctaactttttgtgttttttgcagagatatggttttgctttgttgcccaggatggtctcgaactcctgggctcaagcagtcctcccgccttggcctcccaaagtgctgagattacaagtgtgagccactgcatctggccttacactgcatttctttttcttttttttctttttttttttttttttttttttgagacggagtctcactctgttgcccagcctggagttcagtggcacaatctcggctcactgcaacctctactttccgggttcaagcaattctcctaactcagcctcccgagtagctgggactacaggcacacaccacacccgggaaatttttgtatttttagtaggaacggagtttcaccatgttggccaggctggtctcaaactcctgacctcctcagcctcccaaagtgctgggattacaggcatgagccatcgtgcccggcctacactgcattttaactgggtctacataagtgagagtcagctcctggactctgggtcataatctttgggcaacttcctgttctctctgaaactccatttcctcatctaaagaaacagaccatgtgcccaacctcctaccaagggtctgttgcaggattttacatctgaccatgcctcataaatcatgcagcctgacccaggttgtcagagtacatatttctcttttgttgattctctgtggtatcttatgaagcttatgctttaagaaaaaaattttgtaaacgtttaaatattaagacataaatgagaacttaatctgcagaacttggtcaagaatctcagtaaagttgtatcataactttgtgagtttgcctgatgaaagcgactctccctggagtagccacgtgacttcacagaccagattgacattctctgctgagttcagaaggagtggaggggagcacaagtgctggaggagggtgtggcagggaggcctattccctaacgtgttaggctggctcccctcaccgggagctcgggacccatggagagatttcgaaaccgttgtccccactccctctttgtgccacattcactggcaccctccattctggtttccctagtaacatcactgctgggactctcttccccttccccttctcaaggtctcagggaaatggttaacctttcatgtaaatattcttactctcctctctccaccaagcacaagaaggaagagtacagtctgtctcgagagacagtcagccaggcttcctgtacaaaacagagatgggacccatctcacgctccaggcatggacagcctggttgccttgaaacaaacagctcaagaagaaaagcacccagtaactgcacacagatacttccacttagcatctactgtcttttacatttttcttgcaggaagatccacgtttgaaatttccagtacatatgcggtcaaagacatctttaaaccccaatgaccttggcccccttcctgtgagtacactggagacacatggaatggtctgaatatgtgtgttcctttatccgctcaatgttgatggagaggccctgtggaccttctctatctccaggctttgtggatctcattggtttgtgtttcttaacagaattgggtgtttagctgaattgtagtcatacattatagttcatgtgatatccagtacttatgaaagaggtttctgaattgctagcttctagcagaagatagaccttgtacacaggatgttcaagagacgttctctgcaggtgacaatttaagtggcactcattcattttgtaacttagcaaccactgagtttcagtcatattgctgattaagtcatcagaacaaaaataatgaaaatagtatgggagaagaaggcctaattaatcatagaaagtttctataagtcatttaacctgcagatttttaaagtttttttctcccttgttggtgacggctcagtaggagttgagctatatacttaaaattggattttgaatgaaaccttcacatacatcctcctcaacaactcactctcagtttgaaaaagccgtagggggtgacagggcagtggttggactccaaggctatttttaaatgggaatttttgttgttgttttccaagtgtaagaacctttttgttgcctggtatattagggcaacattggaggctgcgaaggttaaggttcaatcattattcattaggttatacaggtatcccacaccaaatctgtttggttcctgggttcaaatagaaagaaccagagagttagtttagaaaacaaaagaaagcatttttttctgaatctgttggattcctgaggttcagatagcaaatatggatagttcagataatgagggcataccagctttatcttgaaaaaattctccaaatctgtttagttcctgagcttgactagcaaaagttcatggtggataataccaatattagatcatcaactgcctggacaacacaaatacagttaaccatgtctaacatttttatattaaccccctcttcctttcctttagtactcagtatttatttaattaaatggtactcaacttcaaactccactgttccatggaatgctgcggtttccctttgaagcttttgagctagcagcccatttccggttcttcatacagtcagcgcatctgagacctgagcatgtgataaagcgtgttgctagacatggtcaagagttaacttgaaatgttcatatttagttcacgctcaatgcataaatgtaccctagcagaaaagagtacagaggtgttctatagtttttaaatgttgcctttgatttcagaactcctagctaatgtttatattttctctctcccttccttccccggatactagcctggctgggaagaaagaattcacttggatggccgaacgttttatattgatcatagtaagtaggcgctgttatggacacacaggtgttgtgggttagagggaaggagtaattcaaacatcatagtgaaagctttgtcattttactctttatctaggcagccaggtgttatgtggagaaaatgataccagagaatcagtgccttcatacggtactgtgcattcaccccaagtttgcttaaagtagcccatcaaactttcacccaatctgatcttgtgacctattaacgtgtttttttttgttgttgaatttttaaaccacattttgattgttgatcccttgacttttgcacatttaataaatacactctggtaatagaaaataagattagaaatgatgatttagtcaaaaatctgtgaacagtgcttgaagcagcatgtaagttttttagacactgccttcaagggtcctatggcaggatgcccgctctgaccttattttctattcacggcatgtttccttgcacccacaacactaatatatatgtattttctggaaattgtagtatatttgctatagacatttgctccagcacctatgaaaaaatgtgtggtttctcattccaactaaaagttcaactaataaaagtttgctttttagccagtgggattttttttttctcattctttttggaggtgccatgttcttcatggaatcatatttctatgtcccttaaattttctgaaaaagtatattaaaaagaagccttcaaatagatgtaaagtttcaaccatgagtgcaatttggtagtatcttggtctttgctttcatttggttcatgaacagaaagttagggtttccctggcttcacaatttcataactaaacaaaagcacgttgatgagccacctgctgagaagtctggccacaagtaatcctcacacgtataggactggtcactatctcataggcatagtacgtttttcagatgttactaggaggcagagacattgtgaacagaatttcactttcaggccctgggggttgagggcttattataaatggaattaagcaaaagtaccagcagtttacaattcaactgaaagtagaagtcctaggtgtatttagaagagtgagctaccctttgtttaaaccagatatttcaaggtgcagagacttagtttttgtcttttatcaaaaaatgggcagatttgtcaactgtccagaatttcatagtaagcataaagtatttttcctgctttcatgtatgtgtatgccctacttttttccttaatatactatttatttattgttttaagagaatttactaaaatgagagagaggccacacctctttttcccatgaaaaacaaaataatagtttccggcttggtgcagtggctcacacctgtaatcccagcactttgggaggccgaggtgggaggatcagttgaggtcaggagttcgagattagcctggccaacgtgatgaaaccccgtctctactaaaaatacaagtaaaaactagctgggtgtggtggcgtgcacctgcaatcccagctacccggatggctgaggcaggagaatctcttgaacctgggaggtggaggttgcggtgagacaagatcataccactgcactccagcctgggcaacagagggaggctgtctcaaaaaaaaagaaaaaagtttcctttatagtattttttatacatcacaatcacagttttaagacaggtgtgaataatactgatcattttactaaaacaggtctttactggtaacacatcctggtctgtgacgcatggagagcattgcacacaatattgtgacagttttctggctggagatgtgatgcttaggtccccctaaaaagaatgttgtgaatgtgtttcgtataccgcaaggagccaaaaacagaaaaacacaattacaaagggctgtcgtagcatgcgttaaaatagtgaaaatcactgactatttcacttgtggtgtcatagacctagtatgatacatagcagatgcttgatacttggtgacttgaaatcaggttcatggaggatcagtggtgaagctcttaggaagttgttgtgcttgatcagaaagtgaagtgaactcacttgaggagcagtaggtgcccccactccggctttccacccccaccggcctgaggctagcgcaactccggcttactggaaggtggaagaaggtaactacctgctagatgcctgggcttttccttactcctgatcagttctgcagttactccagcactctgcccaaacatttcctcatttcacttgactagagcagcacccccgaggctccattatactctgtacagagcttgatgcaactaagctgtgccaatatatttgtggccattgacttggagattaaaatttattttgcccttgcacaaccatattgaaagattctgttaaagagatatagcataaattaagtgaccaaaaaccatttaagaaaaggatttgtttacgagtgcctccttagctgttcatgctacgtttctaccatcgctccataattcatcaaggtttactcaatggaaagctgtagagcagtacacgtcagtgaaacagttcaagtcatttgcctttccacaaaattcagtctgtgaaaactgcagaatacctatcttttgaagaggctttatcaggctgacacatacattccaaatgggttgaattacctggaagataacatttaggaatgtcctttctgtcagaagaaagcctctttttctaaacaatcttatagcaaaactcagcatctgattttgctgtcataatgcctacaggacaggaaccaggttatgcccacgtatgccacaatgccgtgagtgccgtcatcttgtaaattgcttagagtcatcttgtcttccagcatacctggcacgtgggtccacctggaattacagatgagatgatgagatgcacttgtcttttcaataattaattatttctgctttgtaagtttttcctgagaagttagacattttcaagatgaacaatactcagccatcataaagatttaatttcaagagcaacgaatgatcgagactaacctctttagactcctcgattcctttgtttgctgtctatggaatggctcctggctcttgggcctcaggtgggaggttaaaggaaggtcttaaactgaatctctacatcttgtaggaatgatgtcattcttcttaaagaccagacaggcccagcagctgagtaattggccacaggtatcctatctacaacattagaagagaaaattgaattccagtgattttgtaaagtcctattttagtctttcctgtcaacagtcttactagacctgttcatcgtgactaaactgagtttctcatccttccacttccttcttgtccttttattggaaatatatctcaaagaggaaaagcaagtttaaaagccaaagttctttaaaaaaaaaaaaaaaggataactggctaccccatactttcatacattgaccatacttcactgaagaattctttatcataaccatgtagaaacttgtgttgttccaaaagcttaggctctttttaaagggactttgttttcaccatcagcttcattcagtcattaaaaaaataatgcactaagttcctgttacctgctgggactggtcttaagtggtagagaggggattgcaaagatgaataacacacagtccctgtccttggggaggttaggtccagtgggaagtagcaggggatatttcaggtgttagaggagtgaatcagttgttacacagaaacagaagaggcaaggactgcatctgcttgggaggtggttgggcacagggatggggccctgagagaatgggtcactttttagatggatgacaaacactgagtaggattgaggcagtcaaagccccaggaagagtgatcctaggatgcgtggaggtgtgtgaatatgtgcagatgctgccacgttccgagaaacgcagcattgctccaaacagctagtgtgccgcaggggcgcacaggccaagccaaagggtatctgcccggtgtggggactcgggctcaagccacaggcagtggggagctcccaggggatttcccagaggggagggatggggtcgaaatcgttatttagagagatccttttggcagagctgtagaagatgtcttgaactggggttggggggtgagacaattcccagtgacgcccagagaacagttcagggaaaaaaaatgagccctctagcaagaagcttatcaggaatagagagggttggtccgggaccaccagagtgagtgacacggccaggttcctgattgggacagtgagtggattgtgatactgcacattggaatgtaaggtcacgttaccaattttggtgttgggtgatcagaggtttggttttggtagagttaagctgaagtacttacgggaaacccagatgcagatgtccaggatggagcttgaagttcaggtctggtctgaggacttgcgaatcccaatgagtcaggagttattcatttattttctgctttgatgacaatatccattgatacggttataatccaagttggtgttttaaggcgcaatttttactcagctgtactccgtttcctttatttggttttcttttctcttgttttccatcacaatagcaacttttactttccaaagtcttctgtgaaaggtaagggacccaaaaatgccttttgcttccatcaagattctctcaaacagttgagatttttcatgtaaattttctgccagcatgaaaacaaaagattctagaatcatcacttgctttggtagcttttttttttttttttagcttttcctctgcttctattaaaataataataagactttttaaaattcctaatatggtcattaaaacagaattcactaattattcttatcagctcacttacagtgtatacagaaaataaacagaatcaatattcttcccctgcactcccccgccccggtccccaagacaggtgcagatcgggctggagcatagtggcacagtcatagctcactgcagccttcccctgggctcaagcgatcttcccacctcagcctcccaagtagctaggactacaggcgtacaccaccacacctggctaatttttttttttaaccttttgtagagatgggtcctcactatgtttcccaggttgggcccgaactcctggcttcaagtgatcctcctgcctcagccccccaaagtattgggattacaggcatgagccactgctcctggccaccctttacttttcaaataattttcttcttctttttttttttttttgttttttactaacctagatatccaaaaactctggagaacctactctccctagtgtgccccaccccccgtacctttcatgtgagtccattgcactctctctccctccactccaccctagtacacacacaggaatccgtaaggtctttttaattatgcacagttacaaacaccaagtgatctaaggcagctgttgtgtattatcacctacacaagtaatggtatagatagcattgaacagtcttgtgcacattaactcacttggaagaaagcaaaccaccttttgccagtgtgaccaaacagaaaccatgctctgtaatcttcctctgctgtatctaattctcttttttggactgcctaagctgctttgatttttgtgtgcatatgagtgacgcatgtaatagattattcatttgttcaatgcaggattcttaattgaaagcagtttttcaacaccataagtaaagagaaaagtatttgaaatgagaaaaaaaatcgtgtgtgtgtttgttagccttttgggaaactaagactttttaaatgctttttttcaactaaatgaaaatcaagatcaagttataaatccttaaaagaacaggggtttataattcccattttagcaagttatttgcccaaaacagtatgaatagatggtttatctttagttgtgcatttttgattgagtgtttttaactaaacagtatgtgaggggggttgccatatagactgtagttacctgctaactctgaaatactaatttgtctttagaacacagggtgggggactggacagcttttgaagaatccagaaatacttccttccaaaactttctttacatagaatagatttgaactaatgttctgattttttttttttttttttaacattttcagatagcaaaattactcagtgggaagacccaagactgcagaacccagctattactggtccggtcagtattttcaaattctgcctcttcagtataagattttggttacgtgtttacgtgtttcttgtgtattactgataacggtgatgtcaagggacaacggtgattgagtagttgactagaaacagagcactttgctgccatctccttactgaagtttccaggtgaggtacagctgcatgtgccttttcagatggatttcattataaaggaaaacagcttgataacgacagcagaattaaacatttttcttctcctttataaaagggtggactataagtatagtcaaaattccctcccttcctttttatatgaagcaaaaccaagccctatcttcataaagtgttatcatttctttaggccaggagtagtaaatgtatgccaaaagtttaaatcttttacaactttcaaaaatctgtagaagtttgggtgagattatagctaagttcaggagctggcagagttaagagtttggaactctgccgacccacagtgttctcatggtcccctcatatatgccgggtggaaaaagaatcaattctgatgcaggcgtgatgacctcttaaaacaccgtagcacactgtgttcataaggcagtgtgagaaccccactccctgaagcatcaggagacatttggtatctcacacttgttaacaagtctgtagaatgggaccacactcatcagcagagagcacaccaccagcttttgtcagtggctatacgagtgcagggaggtaatttggaattacaggagttgtactgcgatcagcagaagattgcaaatttgggattcttagaccagaggagcaaaaggaactgaagtttgttatatcacatgctgagctaagaggccagtaggtagatttaaaattccaatttcatggctttaatctgattccattcaaattatgttttgaattagtaagatacatccatttgaaaacttaaaagatactacattgcaaatgtgccccggtaactgactcctgttagttacttgttggatttgtttagtcatttgggtactatttcctaggcaaagtgcccagtagtacctgggtaaaaacagtcaacttttttctctatgcggcttaaacactgccttactctgatgcttccttttgatatatatatattcgcagtcacagttgtttattggaatattattttctcttctacatcattagaacaaggtaaattcaagaaactattctttttaagtgacagaagacttttgacataactttgaagccttttcaaaatatttttatcacttatcaattaccggccgtcactcaaacactgctagtccttattaaatcttactgaaaattgctcagcatcataaagccaagtagatttgcccccaagaaagagctctctgctttctgttaataaaagacccttgtttattccttcatttttattattattattcattatattgctttcaatagaggagaatctgtatttaggtagttatcaacttagtgtagacatttggcctttgttgtcattcagttctaaatatttggcaattttcatttgatttttcttcttgacttatacattatttaaaatatgctttttagtttctaagagtatgggagggttgtgcctattcatttttttttattgatttctaattttattgcattatggtcagataatattgtctagagaatatttattattggatgtttatttaaaacttcattggaagcttgatcactttttgtaaatgttctttttctttttaaaaagaatgtgtattgtgtctttggttgaatatagagttctttttgtgtccattaggtcaagcctgtggtgttcaaattatctacattctcattgctattttgctattggatctaatcaagatagttctgtcagtctctgtggtgactgttgccctgtcgatgttgtctgaggtgtatataactacattctctttctctgttcgtatttgctgtttagcatatcttttctctctcgcgatattttatcttctttcttgccttttgttcaattgatagagtactctctattttattttctctatgtgcttgcaggctgtactttctatttgtattcttatagctctcacattaaactgtgtaacccacatacttgacttagggttaaaatgaatcactgtctactctccttaacatcaggacctcagggaacttgaatgccattcttcccactcccatttgccacgtcattgttgggtggaattttaaaactaccttgctttaaactttcctaatagtcaaatagtcattaatatgttttatcttttttctccctactgtccatactgatttaattttaccaaatgtagacaaatttctttgcccaccattggtttgcccaccattggttcttccatccattttttttctggggtgagttttgatcttagtgaagcctagtccagtttatggttcttactgtgtggtctgctgaccagagtatcagtatcgcctgagagcttgttggaaatgcaagttttcaggtcctaccccagacctactgaatcagcacctctgggggtgggacaccagtctttgttttaactgctctcccagggattccagtgccccctcaggtttgagcacttctgcccagcagcactgccagtgacagtctgagagtggtaatatctcttagtctttgactcaaaaggtctcatttgacctctctgaagttcagctgatgatagaaatcttggttaaattattttccctcagtgctttggagattctcctgcatgtcttctggcctccataaatgatgataacaggtttgctgtcaatctcattgtcgtttctgtgtaggtaaatggctctgttctctagtgattttgaatttttatttgtgtcttagatgttttacaatttcgctatcatcatgtacctatgtgtggagttctcttcatttatcttgctttggactcaggcttcttcagtatggggattgtgtctttcctctgttctggaaaattctcagctattatttcttaacatactgcatttttccgattctctctaagtatctgtttctgtaactcctattggacatttacttctctttcacattgtctgctttatctcttaacttttgtgttttctgtctctcactgctgtattgtgagttattacttagctcttccagttaattctttaagctttttttgtaatctctttatcagttcattgtgtttattatttcagtgactaaatttaattgctcaaagttttatttggtcgtttaaaatttgcttttgtcttcatagttattttgtcctgttctctttatctctttatttatttttgatgctttcatctgcttattatttttaagatatttatttcttagcctctttgagattattctattatctctggtcctaggatcattaaatctcccactacgtctgtagactctccttaagagtgtagattattgcctagttcagtttataatttgtgtgtgtgtgtgtgtgtgtgtgtgtgtgtacatgcatgcaagagggagagagagagcatgagcaagctcatttttttttcctatgaggcttttgtaagtcctgacctgtatttactgttaacttcttagcttgggttcatgcacccccagtcagtataactgtggacctcatacccactttggcacaggcttggagtatggatttattacaggtctgtttctttttgtttttctcccatttatggtcctggacagaaggtaagcttccttgcaacttccctggtccggtgggtagagttttcttgtcccctttccagatgttaggttttaaacaatgactgttctttctccatcatgtagaccaaaggccaagttctgtgtccccatgggagattaaaacccaagcccctatgtctaggtccagtgcccactgatttctctaattgtgagtctttctgcttacctagtacctagagtttctcttcccaagttttaaaaatatcagttctaagtaggcctagcgtttctacatatttttagggagaggggaccctttctgtggcagctcagtgttcagcattcctgtaagttagcatgctctgtgtatagcagatatcactagtaatagcatttagtaagtgatgttcacacatgctgctgtcatgaacactatctcatgttgtgtaacactttcatttttccaagaactttataatcagccgacttgaaactcacagtcgtcccctcagaaaggcagggcaaatgttgttatttccaatttgtcagaagctcagaaagcttattctgttgctgacagtccttgcaagggtcagaatcaggaccggagccccagatgcgctggtgtcactgatgtccccgtgccgggcatgagcccttctgtgcaaggagctccaatgtctcccggccagtgatgatgtgaaaacatttagaaccgacctacacaataaggcagattttcattctgtacccaaaacaggaacacagatttaatgcagagcaaaagggctttaatcaacagatatgttcatttttcacgtagacctattttacaagctaacttgtaagccagaaaatgacattcgagattttcaagtgagaacaaatgatttggtccaataattaaaaaaaaaaaaatgtacgtgtaatctcttcagaagctgcactggaaggatgtttgtcctggtacgttgttggaaagttttcaggaagagaatgtaaaaacttgctcttcttattctatcatgagaactacctctggagagaaaagataatgaatgcaagaggaagacagtgatttttcagctttcacgcatcattccccagaaggagaaaggcttgaaatatctcaacatttccgcccacacctcctcagcccctgccaggagacagagcaggcaagggaacgggcatcataggctgggggccacatgttgaaatctgctccttggggaatttgtcatttaagacagtcgaacttgcatacacagtgatgactgtttaagctttttttccaacattttcaggagtagggggaactgtgatgtaacagtgatgtttggagaaccctcacgaatacaggaacaaacaaaaaatagttgctgggaatcacagactttcagaaatagaagagctgagtcacgtttgttcatccagtcaaattcttccacttaacagtgaagaaactccttagtagagaggatgtgatgcagagccagctgatgagagtctacccgagagtgcaggccttctaacgctggcaggagagagtggaaggaagtcacttttttagttcctatggggtcatttttttcctcatggcactaccacggtttattcattgatttcctattgcctgttgctctcaacagcttgtgagctccaggagggaactgggaaagctacctttggtttatgtactgttatttttctggcacctaaaatgccttgcacagagtaggtgctcaagaagtatcggttgaatggacgagaatgaacaccagaaagtgagaaataaactagagaggaaatcttagtttgtgacgggatgtactgttggtagagcagaaaacatgatctctttattggcttatgtcagaacattgtattctttttcttattttggtggttgtccaggtattaacaaatttataccttgcctagactcagaattgctatgtggtttcatcagactaaacactgcctaaaataaataggatgtgaggtcaaatctgttgttcagtggaaaatcaaagaagactggcttaaaaactaagaaaagaccataggcagtgtaaattgtctatagattgctcctaagctatataaagatgatgtattttttgctctggaattacagagcaaaacactgacgtgctcattttctggaagagtggttgtttgttttgtttcgggttttttatataaacatgtcttaaaactataaaagagggaagttcatgttcttcatttcttctgtttctggtcaagataagtatggtgaaagtgtaaggtttggagtctggagatactagactaaggatcagtatattttattaacttaggccgaaatgataacagcagaagtattctctgctgaaattcatactagtggctaaaaagcaatgagttgttttcgaggctgtcatagttaatgtctgtgtatatgcaaaacccaatcctttttgctcataaaaatatcgtaagctttttcagtagccaaaactcacggccctgactctaagatattgtaagctactttacaaggtagcaaataaagattatttaaatgactacattaacatgttactcctttgcctgaagagatatcacaacttttgaatgactatagttaactcaattcctgagccctcaactggggtactatcactctatttcatagataaagcatttgagatttaaagaaatccttgcccaagaccactaaatattaagggacaaaccttctgacttctaaattgaggattttttgagaatgccatctgcctgattttatattccttgataggagtgtcagttcacttccctttctgctcgttgtatttccccacaaaaattcgttaaaccgtaattagacttttcaaaatgccaacgtaggtcattctgggttgtatgttagaagtatttagccaataactcttacctaaaccacagcaaaaaagaaaaacagaaacaccctgactcatattctgacaaaagtcacttggaaagcatgtttagtttgtgtagcgtaccccaaatggtttctcaaatagcagtatagctgttttcaggggtgaaagctgcattcaaagctgattagccctcatcagttctaggactttcccctgtgctgtgtagacattatctaatttttccatggataatctgagaagtgagaatttacggtttatgactcatgaaattctcttgaatgttgcctcagtatacataaaatttcaggtgtattgtttgcattatctatatttataaatttatcttccaggctgtcccttactccagagaatttaagcagaaatatgactacttcaggaagaaattaaagaaacctgtgagtaatcatgccttccaaaaatgctttgtgttagtcatttgtaagttaccacagtcacttcagtgagaacaacttggttgttacttttatatgaatgctaaaaatattaccttccttttctctctgcactttgatcctcctggttctaaaatctgaattttctttttaacagaaatggtaagtgaaaattaactcagtgttacatatcaaatcacctgaagggtaatttcctatgtaatacataaaaagacaggaatgatttttatgggatataaaataattcagaaccctagtcacaaaatctgtggaagcctattcaattatgcgcagttatcatatttaattaacctggatcccggtaagaaaaatgttcaagtccttccttgtaaatgcaaaagcttagtttcaactacagtatttataatatagtgttatatttaattataataattggcagtattacgtccaaatgtaattttctacttataattatccctggcagtttaaaacctagaaactctaaaaatttttatgggcaacattttaaattataacattgcattttctaatgacacaccatccccaaattgttcaacattgcatcctctgttttactttccgattcctccttagcagttttctcttcaattttctccatcactatggttacacctctagggaggggagagaagcggctgcagctcagaccccctctggtggcctgggctccattgccatctctccctgcctcctcccctcagctggttcctcctgcccgggaacatctctggatggggcacaatgtctgctctcatttaggggttttggtctctgttccaaagtcctgattcaagagcttgcgggtaactgctattgaaatgattctttgccttcaaaactcaaatgatcactgaaaattccacagttttctttgtgagtcatgtcccctggtaatgatgatgactgtggtcatcacccagtctcactctatggctctcacatagcagtgtctgctacccggaaaccatctctgcacattcattcttacagccagaccaagcctggaccgcctctttgcaggaggcagttgccacaaccttggtcaagtgttttgttattttcatgtcagcgaaccatgctttgggctgctttccccacacttggcataatcaggatcccactccccatggcaacaaaatggacttgaggcagcgtggattatatctaccacctggcggccctgccacagttgagcatggataggcccaacctggccaggtggggattattacaggttttgactacctgggctaaagtctcttgagtgaagcaacagatacagtcgactgcctttcggttgccctatgctggagaagtgcccacagttgtttattaaagggggcaaggaggatgttctccttcgcagcagagttctaactttcctgagcatcgctagtggatgccgtgtgtcccatcgtgacacagcaaggctttctgtctgcaagggaaaacccctaaaggagagaatctcagttggaaccatttgtcactgcctgtttctttgaggactgccaacttttctaccatttgctgttgtttttattagaaaacaaagtgtgtatttactgtatgattatgtgttttcttttgtcttttgtgtaggctgatatccccaataggtttgaaatgaaacttcacagaaataacatatttgaagagtcctatcggagaattatgtccgtgaaaagaccagatgtcctaaaagctagactgtggattgagtttgaatcagagaaaggtcttgactatgggggtgtggccagagaatggttcttcttactgtccaaagagatgttcaacccctactacggcctctttgagtactctgccacgtaagtatatggccacacccagtgtgtgtcccccactgagacagttgtatgaatttaaacagaatgaaaggataagcagctcatgagttcgagatgcattaactctgctgagtttgttctctcctcaccccacagccccttgcaagtctagaacaggttctgactctacgtggtgaaatagtgtactctgcgaacatctaacattgattttttttcttgtctattgggttcatggagttgaaattgaaaacgtggataattatgataaggaacaggaggcgattttcatttgcagtgttcaagaggaggacttgtcagtgttagaattcaaaaacaaaggaggtgttttttgaacaagagtcgtttctgaggtctcctgtgtaaaggcaaattgtaaggactttgaggacctaggaccatgccctgctcctgtaaggaaagaaccaggtttccccttgcattaggatttcatcattgccaggcttggaaactgaggcagactaaattgctttctgagcaattaaacatcagctacttccaggccagccattcctccttcagactctgaatcctccaagggttgggcagtacccaagcccccagtagaatagtcattgaccttgctgaagggcatttgtcatcactccagccctgggctctaaggggacgtgggttcccccacatctcccacctggtaccagtctcctgggggctcatttggaaggccgcctcagtacattcttcctggttgctctagccaagaattgcccaattgatttgttgttactgagtcccatgagaaagcccactatgtacaatgtatccaactattgaaggtggagggcagggtggagagagacaagatctttacctcttctccacattttcaaagatacccccaccccggaggaatcagtctgtgatcccagtttgaaaactactgatccacatgattgtgaaccaagcaagatcatttggacaaatctaaaaatttgcaggtttgcatcattgagagagccatatcctgttcctaatcccctcgaggccttttcagagcagagtagtggtcagaagacagaccaagggttgggcccatagcaaacatcttatggccaagccaaaagcctctggaaggaattaaacttccttcatcacagagacgacctaaagtactcacatctttgggaatccctgcacagcccctttattatgtggcgtttctcatctccccaagatatttggctgaaccatatgaaatagacacttcgtaggtcaaaaacagtcaaacatcagcgtctcttatggtttaattgactttagagggcacatgcgtcagcctccatggtgggtcacggttgagcatgtggtaagtcaggtcctctagcccacacattttcccactaggtacagaatgctcgcagggacactgtaaaagttgagtgacaggtggcaaacaaatatgcaaaatcttgcatttgaaagtgtgattgggcttttcttctctttctcctcaaaagggacaactacacccttcagatcaaccctaattcaggcctctgtaatgaggatcatttgtcctacttcacttttattggaagagttgctggtctggccgtatttcatgggaagctcttagatggtaagtcttgaagtaataaaaataggtcagtgctgcttgcggtttgctagtaggtgtcttatctttcgcatcatgggtttttaagcaaaagcttcactggtttactcataaagtatttttatgttttgcccataatggatgtccttttctctggtagcttattttgggcactgaagacatagtgtctacacacagttaaaaacaaaagtttttttttaacttcagtgtaaaacacagaacattatgtatttatacatttgtatgttttctggaataactttagtgaaagcaagatttgataacagatggaaaaactaattgaaaagttaattaaaatgatctcatctatctaatatcctgtgattattgcgtttgtccccaaattattttttaatttgaagggactaaataatttcaaaataatgttactgcttagctaagacattaaccctgaaacaaataacacaaaataatttcattcttatttaaagcatatagatcatggaagaatttcaaggtaccttgaaagttagaagtcaaaccctctacctggcggtatctataggcttagagacttctaaaagatttggccaattcaaaatagtgtccttaagaaaacactacagaaatcatcagtgagaaaaaagcatcagaaatactttttaagagcctggaggtagagtggttgaggatgggaagagggagagtaggatttgagattgacattgcagtaacttataagaaagatatttccaagggaactgtgttcattgcatttatagagccttagctattctaataaataatttgtataccctctgtacttttcccatgaatatgtttttactgttaattggtagctgatattgatgctctgattttgttgctttatttggtagcagggcgacagtaaacactttttttcctctagaaggaaactaaaccacacactctttccatgtatgtatagtgtgaatatattttaatttccagctttggagtcatgccatagattgtttcagcctgctccaattcactccaactttctcagaaggtcagtttagtcaccgtatgcaagtgagaagatgctgttagttgctacagtgtctttaataccctctctaacagggggtaatagagaagcataagatatgatcctgaccttagtcagcttatattttagcggggggaaaagagatgagaacaaaaccagaagaatcacagtgatagtgtctgagcagaagggagtgcattgagtcctcagaggagaaagtgacttggctggaggctcagggaatctttcccaggatgagctgcacctcggaggtggggtagcatttgagcgttcaaaggctggggtcatttcagatgagtgaggaccagcccagagtcaaggccttgtggaagaagatgggcggaagcaggaaccactcagggtctcaaggagctggctaaagtgaccccgacaagagtgatcacgatataaacctggaattgcacatttaagagtccaagtgcacatagatgggcctagtcagcagtgtcttcaaatttcccacagatgggaatgtccctgtcggcagggctcattctgcacatctgtccgatgggaatgtccctgtcggcagggctcattctgcacatctgtccgctgctccccctggtcggcttcatgcttttacttccccagacactggagtctattggagcctgcatagggccacgctgagccggggagaattggcctgtactgcagagggtgggtgcctggtggggggatgaaggagcagaagcaggagcctggggtgccaggtctggtggggtcaggaccccctgtgaggaggtgcgtgatgcctttggatcaggtgaaatggaggcacctgcaggacgcctgaatggtgggaggccgacctcgctgctgttgcctccctgaggcctctgccgtccctccgcggggggttgcacaggccctctccggggccttccccatttccagcctgtccccttcctgtgctttctccccatcgctgcccaagcaatgataacagaagacagatggaatttcacctggcctttcactgactccccactgccctcagagagcaccccaactctccagcaccccatgtgggctctgcactgccggccccttctctggcctgtctacccgccctggcaaacggctggcaagtccccagccttgttcctctgcttagtgtgcccttttctcccccaattcctacgcctgatttgcactgcggactctgcttgaccttgaagctcatctgtcacctcccagaggcctttctggccccactctgctgcgccatctctcttagcacagctgccctcctcatgccactctccccctgatctcgcctcctcgcttgtgcaatactgtagaaggcccttggttactccttcatggtttctcatttacattgaaagcaggttaatcttttctttcatgctctgatacatagcagtgtcaaagacctgaaactaaacccagtgtttaccgtgttttaggtttcttcattagaccattttacaagatgatgttgggaaagcagataaccctgaatgacatggaatctgtggtaagtaaatgcacgtcacacactggccatcaccgggcactcgtgtcttatgagaaggtattggagagccatatttgtagtctcagccacttttatgggtgttgcattccatgtgaacaacaggagacatttaattgcttgaaaagttcattgatctaattcttgtaataaatcattgttcacatttcctggaaccatggtacctagggtggatacatccaaatcccagttgcctctgcttacccggcataggacttgtgtgaacttactaaatccaagagacagctgaagatctatggtagcctgtgttttctataaaaactgctgctgctgaatgtttagagcttcatccgctctccctctgtttcctgacatcataaaaatggcagaggcaaaggtcaaaacaataggaagagtatcaggcagacgtcctagacatggatgagtgacgccacagctcaggcaagtgaacacttgagacgttctccaagtagtgatttgggttttcatgttgcatttaacattaattttacctagacagaccattttagagttggaaggattttattttttttttattttttttattttttgagatgatgtcttgctctttcacccaggctagagtgcagtggcgcgatcttggctcacttccgccttgcggattctagcaattcccctgcctcagcctctcagatagctgggattacaggcacacgccaccatgcctggctaattttttttttttttttttttttttgtattttagtagaaacgaggtttcgctatgttggccaggatggtctcgatctcctgacctcatgatcctcttgcctcatcctcccaaagtgctgggattacaggtgtgagccaccgcacccagcacggatttgctataaaacaaaaattgatgttctttttataatatacttctgcttctgtttttcttttaatgtacctataccccacatctacctccagagtgtatgggtgtttgcccacacgccagcacacacacagggccactgggaagcgcgtttgtccatttggggtatttgcagctcattcgtgtttgctcacttgagttaaaaagcccctgcatgatgtcacctgcctgtgataccaactgtattttgggcacggttgggtagatgagctgtgtcctcggccctgaccagcgctgactcagtgtttctgttgctcctcattgtatgaaaggagaggaagaggccagcagtgcccttgaacccactgctggtttgccagtcatggtgggttgggatgcacacctgtgattccggtctccactttgaccctgtgtttgtgctttctgctttcatcactgtatgatgaagcagctaggagcacaggaatttctcttaacgtctaactttataccacatgctgacagttagtgcctaaagtacagtgcgtgtattatttttaccctcttcacagcccgtcgtgtccccagcaggagagaccgtggagggaccagggacaggcgcttaggcctgtgactgatcctctggattctgaaaccagagcagccaccctttttgctgacattaacctggagagtgatcaaagcacaagaaaggggataacttaaaactattggtatttacttagttggaacattattttacttatttatttttttggcgatagaatcttattctgtttgccaggctggagtacagtggcacaaccatagttcactgcagcctctatcccctggcacaagtgatcctcctgtctcagcctcccaagtagctaggaccacaggcacacaccaccatgcctagctaatttctttttttttttttgtagtcatggcgtcttgctatgctgcttaggctggtcttgaacagcctcaagccctcctcctgcctcagcctcccaaagccgaggattacaggattataggcatgagccagcaagcccagtctagaacattctttatccttcctgttttcctcagatactttcactctttttttaaactttatttattttttatagagacagggtctcactatgttgcccaggctggtctctaactcctgggctcaagtgatcctcccaccttggcctcccaaagtgctggaattacagcgatgatattttcactctaaaaagatagaaagtatattgaccagcctggccaacatggcgaaaccccgtctctactaaaaatacaaaagtcagccaggtgtgatgtcacacgcccgtaatcctagctactcaggaggctgaggcgggagagtcactagaacccgggaggcaaagattgcagtgagccaaggtcatgccattgcactccagcctgggtgacaagagcgaaactccatctcaaaaacaaaaaaaaaaaaaaaaagagagagagaaaagaaagtatacttatgtctgtatgttaaattttgtagaccagtatggcagctccatccaccatccagagtaggtgccttccactgtgcatcactaaggacaggatttaactgcaagctcattacaactaaagcagtttgtttgtttatagtttaaagaggaaggtttggtttaggtggagcaggaaacattgcattagtaacatatttcttgagcattctgcacagaattacattagaatgtaattaaagaagtcaaatgagtttgtattttggggaaaaaatgctgaattttcactcctgtgtcattctgtaggatagtgaatattacaactctttgaaatggatcctggagaatgaccctactgagctggacctcatgttctgcatagacgaagaaaactttggacaggtacatgtgggtaaccctgggaactcttctttagctttcaaggggcatttttcttcttgacgggctgtaacacaactttgctggaccatcagaaacaaccagcaggagctgcaggtgttaattttcatctcattgtagcagcaccttcttgtcatgccaagacgccacactccaattacaaccatttctctcttccagcaaagttacagaaattccaagaggccttggggcatgaaccagcacctcttctaatccaaagcaaatgtgaatgtttcatttgtgcctcggttttagaatttaggtacttgaaaaaatagtgagattgttgacttagcgatgtaaatacatgaccaggagtgggtgatgttggaagggccattggtttttctctctgttttatggttctgttgtcatggcgacatttgtcttgtgaggctcagcatggcaggctccggtttttctaccattccctctgctttgcccccacgctgttattcaggctggactaatcctcaaagtcagtttcagactggtcagcagggatttggatgggccactgaaagtggatttcaaaggtaaagttgcctgcttggaataattctcatcatgctaaggatctatgcgatgtatttgtctcaattctgaagcctttgcttcatctgccactcagtaataatgatgcagcttgggaggtgttctcaatgtattctctgaccctggtacctgtccttccgcaaaagcccagaggtatttcccatccttcagactaaatctccacggctatgaaattaattagaccatagaactcattgtaatggttgccctctgaaaaatgaaatagacgtgttctttattgctagatgtcaaagattgctagagaatctttgagaaaagaagctgatgccactagaggatttaatgacaactgagggtaaaaattgttggataagaaaataatcacattaatatcagaatcacttgttattcccatgtcctgtgtttgagccaggagagttcagtctctagtgtgagtcctggtgtgggtggaacctggggagtccatagggcccttcagtggctaggcaaggctcagagaaggacttcaggcaccagaggcaagagaccttgtggcttaatgtaaatgatcaagtcctttaaaaatctccttttgtgccccctccccactgcccccctttcccggcctcctccccaccccactgtgttgtgcttgatgcctgagaatccttacagacaggcggacactgttctcctgcacggggaccttgtgatggggcagggaggggtcttttcagctgctgcccctctggtctccagcagcctccccaggaccgagagtactggtgtctccagccctgtctacctccttcctctgctgcctttgacacaaatagctcactccccccagagacacctgcaaggcacagtgcctttcactccgggctctcacccctccccactggtctccagtcccctggaagtgcatgctcctctgctggccctgtggatgcaggtgtcaccctgccagctgtcctgcacccgctgcttttttgtctcacccttgctatctggatttcctcatcctacctgtggctccggctgcacccatctccgctcaccaccagcctcttatctcaggccggcgtctgccttccagcctccagaattcccaggtctaacggcctcctcaactgcttctcctgagaggctcacgggtcccagtgctaaagccactttttcctccccagcccccacatcggttatggtctcatcagtgccaccactgtcccctcccacctgacacttgggcatcccctcagaatctccctctctcctcatgccatctcccctcctcatgccatctccccgtgcccaggcttgctgtgccccgtgactccccgtccttggcacgtccctgtctgtgcactcccctagccctgctccgatcacttcttgactgctgttctcacagcctcctgtcggccgccccctttcctgctttgctgttctccagtgccctgttctctagtgcctaccctgttctccagtgccctgttctccagtgcccgcctagctgtgagccccttatggactatttctgaaatgcagccctgaaaatgtccttcttctacttggccatcttgtgaccttcagcataaatgaaaactgttagcatggcatatgacccctcataatccagacctacccccctctggcattaccctctgacacctccttcctgtcaacctgtcaacaaacagtgtgccttcaagggtttccccagagatgcttcagtgccacattgctggctcgacactgcccactctgtaccgatgcattctcattctctctcccatcacctctttccctgccatcctcgaggtattgactgacgtgctgtgtgctgtatgccccctgaggtcttctgggtctctccagggctcagcatgtagttgatgcctgccagtgctcattgagcaaacgaatgaggagtgctaacctggcttattaaaaatatgaataaggtggtaagtaatagaaatcctaagtgtgagaaaacaaaatcagtcaagtcttggtggctttttttaaaaagccggacctattgaagggtcttaaactgccaattttcaaacgattagacatggttagtcaccctggaagtatcttcctttcatttttaacatatgaaggaaggagtggaagtaaagaaccaaggaagactgaaagtcagtcttgtgtgtcacatgcattaaaaaagtcttttcgtagattcattcatagaaaaccatatgaccaaattaacccaattcagaaaactattaagccacaatcagaagcaaatgatctgggaaaccttcctaattacatttaaatgtaattgtttccacctcataaatgaaagtcaaacacagggtgttggagtttttaagcaggcctctaataaatcttctgatgatcgttcaggccagattttcattaaaaacagttctcagacctcctcgtttaatgttgtgaattcttctgacttttgggtaggatcaagtagagtaatgcattaatcaaaacagacccatgagatgagtaagataagaattaggtgcccagtttgttgaattactgccttgcctttttgagagagctatcctgattaacagggaactcacgtatttattttgcactctgggaaggaatttagagcaagttaaatagctgcatatggatctcatctcccatatccagtccatcagcgagttgttcacacacctcccaaacctttctcatttctgtgcattctgccgatctcttctctcactcacacccaagtccaagctcccatcttccccactagacccccgacccgtctctacatccaatatggcttcttataatggcagagtggtctttttggaatataaaaatgagcatgtcattcctctgccagaaaccttcaggggtctcccctgcccttgagataaagaccccaaccttactttgtcccacaaggtcctgcgtggcctggctctccctgctcctcctccagactcactgtgaatcacaggccccactgggcttgtccaacacaagccccttcctgcctcaggccctctgctttctcttccatctgttgggagcatactccctcccagtctcagttcaggtgtcccttcatcagggaagccagcccttgacccagaccctatgcatcttccatgcctgccctgtggcatgtaccacagacgactttgcatttgtctgagtatgtttgtgtttagtgcctgtctctcctgctcagcttcctcccgatgatggcagccgcatgcctgccctgtgctcactcactgtcgtgtacttcccacaagcactttgcctggtgcatggtgggtacttgtagttgttgatgtggaaatctaggtgttagcatgatgcccggacaagcctctcacctctttggccctctgcaaaactgttgactctgacccagaagaaagcccattcctccccaatgccaaacagtcaagtcacttccacagtggggcaaagcaagtgcagttgtcatggggtgaaacagacatgcagtcagccttccacggtgtttcaaccttctttttttttaatttcacagttagaaatatcagaccatgaagtttggtagctgttccttcatgtaatgaagctgcagctgttgccattattttgcaatttgttttctttctgattggtaagaatctggggctgctggtttctagggcctaatatgaaagtttccactgaagaaatgtcagtgtttgaactatgatcctgtgccaagcaggaagaataagccgtacccccattcactgctgtgcacacatacctgcccccaccgggaggaggggcccttttagggctgtaacaagtgaaaattctttattgcaagttcagcagagcaacgtctaatttggttatgggtttgtttgtttgtttgttttttgagacagagtctcgctctgtcacccaggctggagtgcagtggcagaatatcggctcactgcaacctctgcctcctactttcaagcaattctcaatgcctcagcctgctgagtagctgagactacaggtgcaagccaccatgcccagctaatttttgtatttttagtggagacaggacttcatcatattgcccaggctggtctcgaactcctggcctcaagtgatctgcccacctcagcctcccgaagtgctgggcttacaggtgtgagccaccgtgcttggcctgatttgattgttttgaagagctgccagaagtttcaagaggctgtgcagtagttggagggagaccatgggcagcagccatataggaaggttctttaggatcgggtcgagccagtctccataggaatgattacccaaagggaacaaggaggacatcatctcagacattgaagtggttagtggccctcccagaagccacagcacattccacaggtgtactgtggatctctctgttaagatttcatggagagaggtgggccactggcagaaagaatctaaaaaggctctttagggggtgataatgaattaaaaggtagagaaacacttgggggaaggcagtgagtgaaaaggcagaaatggtcaatgagggagagggcagagcatgtcctggcggaagccaggagccagacgaagagcccggagctggaggtggctcccaggagcgctgaggccccggccccttcaggccagtcagggacacagaggggtggcacctggggagacgggaagtgggaaggctggcatggacttgctgcctccctgctgtcggtagttgcgctgctggagaggctggggaggatgaggaaggcctggttggtggagtgatgggggtgcagggtgctgactgcccccgaggccgtgccctgcaggatttgtgagcacccatcagtgggcgtttgcccagcagtgctccgtttccaagaatggagtctgacaagcagataagccttgctccacccaagtccagcatattccatatgagccaagctgtttctcagcagcttcccaggcagcgcaaagcatttatggagggtcagggagatgtgtgggaatcgggttgttaactggccaaggcagggagtcccccagaagttcctctgatctctgtgaggaagagagccaagtttatgctggggccagtagacttaaagaggaatttttctactgcagtgttctcccacgagctcttgctgagcgcctgctgtggctgggcattgtgttccttgtgtggggtcctccaggagcccaggcacaggagggcgatggcccagaaagccctgggagggcggggtgtgcgtttcgtggctgaaggtggcaagaatccaccccacagagcaggctctgcagactgctcaccagggagcagggcccctgggtgccagcaccagctccatctgcagttcgctgtttctccttggtcactttgctggatttctgcctccgggatgctgtccaccctcatgacgggggccagggcgctgccgcagcacctataggagatgcgcagggcagagagcagcccctgtgtgacgctgccccgatttctcccacttagggttgacactgtcacggtaccacccggtgttcagtgctgaggacatacagtccctcccctcctgtggtggcaacagctgatgttaagaagggacaaatttgggcgaaaggagaacacaggctgtagttagagtgatggtgagacaggaatgaaggcccgcagggaatctgtgtgcctggaggcgagcattagagtcagatagccgcctctccaacccccatggagcctcgtgcccaaccagcaaggactctggggcatcggccagtggcagtaagccagtgtggtgggctggacaatatgcctgcactgcaggagacggtgtcacgatcagcccccgacagccggtctcaaaagtggaatttgaagagtggtcattgcttctcatgaaagtgtcgccgtaactcatgaaagtgtcacctgtaacgaatcctagagggatgcatttctgtaccacggagggctcgagccgagacaccgagatctgggggcgtgacccctaacctagtagcttagggagcagaattacaaacccctcatcctgtgcccatccttgggccctctcctcactcccccacagagaaacccagggtcagaatcaaccatgagacttgacggctgcccacaggatgatttactgctgtgacctcatttagcatgggttagtgtgggcccattttttcttttctttcaaaaattatttatttatctaattataaaatattaacctccataataaaaataaagccagtataataaaaatatgtaaaataaataaatgtcacttattcccagtatctcaagaaaactcaggattaaaatttttatttacattttccagaattattctctgtaagcacaaaacagatttttttttttacagaagtggaattgtactctgcatactgttttcttttttattttatttatttatttatttatttatttatttatttattttgagatggagtctcgctctgttgcccaggctggagtgcaatggcatgatctcggctcagtgcaacctcagccccctgggttcaagcgattctcctgcccaagcctcctgagtagctgggattacaggcgtgagccaccactcccagctaatttttgtatttttagtagagatgggttttaccatgttggccaggctggtctcgaactcctgacctcgtgatctgcccacctcggcctcccaaattttttttattatactttaagttctgggatacatgtgcagaatgtgcaggtttgttacataggtatacacatgccatcgtggtttgctgcacccatcaacccatcatctacattaggtatttttcttaatgctatccctcccctagccctccaccccatgacaggccccggtgtgtgatgttcccctccctgtgtccatgagttctcatcgtttaactcccacttatgagtgaagctggaaaccatcattttcagcaaactaacacagaaacagaaaacagttttcaaattaatatatcacacataccttttcatgtcactgaatatcagtctataacattctaatgactgtgctgaattttactttgtagacgtgccatatatttttaaccatgccctgttggtagacgtttaggctattttagtattttctatataaacatataattctgtataaccctggaatactcacatatatacataatatatatagcatacaaatgtataatctggaatatacattttgtgtacttgactaatttttttccattgctataaactccaaaagagaaattactgtgagaagggatatataattttaaaattgtgatgcctattgccaaattataatatcttcagaaaaagattgaaccaattagactcccacccacagtgaaggggagaaccagttctctgcactcagcaacactggcttattttctctctcatccctgggcgctgcttttggaggaagcagagtgttttcctccttagccctcccctccccactttgtctgtggccgacccgctcattcagtagctctctggaaattacaactttcaggcaacaccaaagaaggctctgtgatcaaagagagagggctggatgaatgctggaaggagtgtattacagggattgtggatgcttatctacttgacctccttccccttccctgtgcgaggggaaagggtgggaggaaagattcggcttgagtgtagccgagctgtaccgaaagccttctcgataccaatgcctgggctgggatttattaacttgtcattgacgtggatctgataagaaaactcttaccgaaggaacaacaaggcagtctggggaggaataaatggggaaaagaagaaaagccaacctgggtttattaacacatagaacaaaaggtatggatgagcactgtccacgcacctctgagaaccagccacgaactggcagagtttcactgtagaaacatccccaccccacccccaagtggaagctgtttggcatcctccatccccaacacggcctgtacggggcaggagcagatgacccctgggagaaaatgggatgcactgggaagatggcagctagaaagggaaatggagaaatgaaggatgtcagcaaaaccggaaacgcagcaaagggattaaaattcacattgggcacagtgaagagttcagttgactttgcagaaatggaaagcatagtggaaaaatgagattccttcctgaataaagagaaaaagagaatgtcgagggaccggatggatgatgaatgtgttttacgttgaaaagccatctcagtgtgaatgggaacaagagccagtgcgtggagaagccgcatgagagacccaggtgtgagtgctcgggtcagaggggctcaggatctcctgggtgcaggtggcaggaccaaggaacccctggaggtggcctctgccagggcatagagttcatcacaacatggaacctccatccctcctgggtaccaccctaacacttactttggaaaaccctctcccctggcttggtttactctataatgcaaccagcaggcagaggaaaaaagatttagagggaaccccaccaaaatagtggcatggctttctttcagtaggagaggtgtaggtgctatatttttccaccttttttccccaaaatttctacaatgagaaaaaaacattttattttaaaatagtaggcctctctcccttccctcacgctggttactgtgctatgtggccttatggtaagctaggtctgggtcagggcataggagaaagggctgccctgattgcagctgcttttttcatgatcatgggtggtgctaagggaggaagcttcagggcagatgagtgaggagaaggcgtccaatgcaaataaatgccttcaaaaaccagataaatctgtctcttcagcctggatccttaagcttctttcttgtctttaagtttctgtttgcatttttgaaagaaataccatgcatcctttttttatgactagaaaatataattttcagaaacagaatgcattagaatttggatttctggagtcttgatgggtgtaccctgttcttttctctgttaaacataattagtttcctgataaatgaatagcagaggaaaaaatgttgctcttcattattgctaatatatgaagaataattaaaagtcataaataaccataaaacaatttgcctttaatgatagcatctttaactgtgtaacatcctagcaaaaaagcctcattggacattctcttgtgcacagagcccatttgccgggaaatatttctgaatacatgttgtcttccctttatagtaagacattgtcactcaataataatatgcaagataacttcgtgatagtaattgttgttttgtctttgtaattacagacatatcaagtggatttgaagcccaatgggtcagaaataatggtcacaaatgaaaacaaaagggaatatatcgagtatgtatacacatatttactgccttttctttgaataattgaaatgcatgtttggtcactgtcccttgctgaaacagctcatgcatttattatgggcatgagtttattggtcagttttcaacaaggtaagttcttttctggcttgggctaatgggaagttgaatatgggatggaaagtctgtcttgtatcatgactccattgagctgccctataaaggagcagaggagggagaaaaggtctatattattgagtaatacggcaaatactcttttggaatatgtggatatcaactaagatttagaattgcaacggagaaccacggtgtcagtgaccagcagggcaaaattaggaaccaacaaagaaaaaatattttgtctctctcccaacttcttttccataatagaaatgtatagaaatagttaaaatggataggaagaattcagcatgtgcaaccctaaggaattctttctggtatttgtaatattcttaactcaacttcagcctcagtggaacaaaatgttgagtctttttggaagtctagctgttaagtgattctaagacatttgtaccaggcagaagtttttctctgttgggcacgttacgttttcttttttagtgtatatgtgtgcttcaaatgcataactctgggatcttccaaggagatcccctggtgcaggggtgaggtgagcactgcagtgtgtggttcctggcacctggtttctgctctcttgtgggtcgccacagtggccctgagttcctcgtttgcattcagtgcttcgtttcaacaggctaggctccctcctttcttctcatttggaattggtcagaggtcttgaaatcagacagctcttgcattgactgtgggtcttagcacctttcagtgtgatctgcaaagaaaaacctactgtccttcctaattaggaagaaacggagcgtgttagagtctctactcagagatcctggcaaggagtggaactattacatggcggactcttttcactctcaagttgaaagcttgttatgctgaatacatagactagaaataaggtacctcggttcttacctggccacattaattggcactctcgttctgaatatgaacaatcttagctgatgacatcctggcagacaccattgtcttccttcagaaagtacagactgtgagtggggtttaaaaaatattctagctcagggtgacccaggtctcaagtctgaggactctgacatgcgtggtatgtgtcttgcatcattctttgcagttaattcttttagggttcaaacgtggtgggagtcagggccaggcagggttccagctagctttacttttaaaagtataattgaaatcaccaactgctccctgatacctctgctcccctggtgccagaagaatgctgttgagctgttcattgtagcccaggaggtgccacctgagaggccgcacagtggttgtgctgcaggctggtcctcagggccattaccatggttacagtgtaccaccccgaaggtgagaacccttcagaatgatggaatgcctgagatgacatccagagtacatttgccttgcgatcagttttgctgtgcattaaacactgtcgcagggaacttggttttggtgaacttcagttgcataaggaggtcttaccattcatcctctaaattttggcattaaattatgagtgcaaatcattttgctgataaagcttatatgttattgttgaatattagcacattggatactagaatgaaatattagataactaaatgcattgtcctgagtacactttacaaatatgtatacatatatgtgggtgtgtatacgggtgtgtgcatcttatacatgtatacctgtgtgttcataccccatgaacttttcccttttctccatgttgtcacattttaaagcagttaaagcatttaaagcattttaaagcagttaagcatttaaagcagtttaggtcagccaaaccttgatgtgggggaagttaattactcttttgaaatctccagtgagattttaggtttttcacgggtgttccagggagtcttgaaagaagccatgaataaactaaacagtgggggcacagaggagaccctcccctctgctctgctgtcgtggatggaggagaagcactccctgttgcggagaaagcagtgagcactagtgatgatggaggtggttcaatattgtcctcttttctcctgcagcttagtcatccagtggagatttgtgaacagggtccagaagcagatgaacgccttcttggaggtaagccatgctggccagggttctctgccatgtgcctctggtcccgggtcgatgggggatcgcgcttctcctttagctagtgtggtggagctgatcagagacagaggcgaggctggggaccctgcaggaagaccgggatcgcacagctcacaccgctggccagtctccagcacaagagtgttcagccaccgtgccgccacctccttttccttttcacgggttctcctgcttgacttctcttatttttacatttgtcctgtttttaaagaggacgttttacagacttgatctagaaccattgtcttggagtttcaggcggtacccaagagaaggctgccttttgctgcagtgacaggttccaagaagcccgagggctcagagctgaatgatgaagcgcagtccccaaagtgcctggccacccctccctccctggatcactgctgcctgggcttgattgattgattgattgattgattgattgattttgagagagattctcactgtcacccaggctggagtacagtggtgcgatctcggctcactgcagcctctgcctcccgggttcaagcaattctcctgcctcagcctcccaagtagctgggactacaggcacgcgccaccacacccagctaatttttgtatttttagtagagacggggtttcaccatgttggccaggatggtcttgatctcctgacctcatgatccacccgccccggcctcccaaagtgctgggattacaggcatgagccgccgcgcccagccatggacatttttttttaatcccctgccctttttctttgtggcataattcattgcaggttctcttctatacagatacatggaaaacacattttcttaagctgagtttttatttattttatacccagccacctcatgacagcttttaccctgttacagagcaaagtgggcactgcccagatcgaacttttaatatcagggatgctcccaggcccctagcagtgggtgagggattcatcattttaaacagtattccacttggaccaaaagcaaaattctttcttaaatatgatatagtattagttacctcaaagatcacacaggaaacagcctcgtgtccacgtgactgattttctctgcactgaggcagagctctcgtggggtgatgctttcccttcactcaggtacctacacaggatgcgtgaaagcccgggcagcacactcagaaacagctcggggccttagggacttaaaatgggaggacagaatggcaggtttcactctttatttagataagaaatcccaggaagcagattcctgggccccaccgcaggcggtccacaccttcagaaacgcggcgttcgcagcgcgcagggcccagcagagctgagctcatcctagatcacgccacagttagtggtacctgggaactggagcatggttttctgtacgcacagtgtctgcacccatcacctgcctccctctgtgtttcttctccctgcctccagcacgttatttttaagcgtgtctcttacacatctgtagcctgtgcatcttaggacgcactgactcacagcagtgttataaatggcttttggaatccaccctgcctacagtatcccatattttcatcaggtttcagaaattactccactacttgaatcttctagattctatgctttttcgaaactgttatattgtgactgtgctgtttttactggaactatagttacttgatactgtcactgacataggaatcatcaggagagattatatttttttctggctaaccagaaaagtttgtttttcctgtgaaatttttttttttgaaggcaataggtgtttaagatgttttttttttttctttcagggattcacagaactacttcctattgatttgattaaaatttttgatgaaaatgagctggaggtttgtattataaacattattttatgtaaagtggattttttaaagtatctctcattactttacaagtaatattttaatattcttggatccataatgtcctagagagtaactttagatgaattatattacatgtctcttatagggcttatttgccaatgtggttctattacatgtctcttatggggcttgtttgccaatgtaggagtaaggaacagcaaaaataatcagctgtagttgccttgtccatcagagggcagttctggaacatgcctagtaagtagaggccactgagcagagctgggatcatggccctatgcaccaggcgaggcaaattgccacaacaagtagaaacaaggtttgcagtagccctctggacagcagaaacctgcttacactaccagactggccaagtatcctctgctgcatccccatccacccccaccgtggcagccaaatgggggtcttggccacaaggtggccgtaagcatctacttgggcctgtagaacgacgtctcattgaacttgaagtggtttatgttgagtgaggaaaaatgtcagaaggcaacagggttgtagcaaaaggtagtttagtgattgtctagttcagcttcttggtgttgacatagttgagtaacagccattttaaaaacaaaggaatatctcgccctttgttgtgtcgagagaaacaggggaaagactgtctgttgagaagccgttggtgggactcggccatttgccccgtccatagccagtgagtgtttcccatacactggccttctatacttttatctcaaaacagaaagttcaagatcgatgatgtctatagaaatcatatacctcaagcctttcctctgataggtgggaaactgaggcagagagcagctgggtttacccagcaaggttttggcacggtcaggcctaggaactttatttccaggcttctggcttagttctgtttccatttcattctggtacctttgcataaatatcttccatttgtccacaggaaacctcccctgatggagagttgcataataggaacggcaaaccttagactaaatgctaagtcgaagacccagttgtgccttagcgtatgtctgccattcttaggcctctgggcagatgaggtgatttgtcatcactggaattgatcaacctggaggagagtcataagcactaattcttttgtgggtagggagatgcttttagatattcagaggaataacctctcaggaggagaagcagccagggtaatgcacagatgctgctggagcgtgagagaatccacaggtcccatgcgtaagactagaggggtagggaggacgactgtggcatttttatatccgatacgacatgccgtggcttgcgcaaggttcgaattgagctgccctcgtgactgctgcctctgtgatctgctatggcaggtggagcctggaacaggtgtctgccttcctctgttgttatgatttgctagcttaccttcgcggcacagtgaccacatgctggcactgagggtggtcatttctcagtgtgtgatctcgcacctttcacatcctgcttttacatctggtaaattttcttcctagttgctcatgtgcggcctcggtgatgtggatgtgaatgactggagacagcattctatttacaagaacggctactgcccaaaccaccccgtcattcagtggttctggaaggtaactccggggcccagccccagccggtgtcctccacctgaggcaggattgagggctgtgtggcgccctccattgtggtctgacttcaggactgatgctggctttggggtctgttagagcttggactgctgggggagggaagaggcaaactgagccagcagccccgtggtggctcctctgtaactgtagcagacagctagacttgaatgaagttggtccctacaaaagcacactggccttccttgaccacctcgtgaaagtgacttttatttgagggactggtcctccaatgcgtaaatagaaatggggggcttctcagggcagaaacaggcttcagggatggctttgcaagatgccactttctgttaagaagtcgttttctcaatttttaaaatatattccaacaaatattttgatctgtgtatctttcaaccaaagataacacaacatttgatttattatcttagggccactgtttgtatcctgttcagcttaggagggaagtaaaataggaatgggttagtccaaaggagatatagtaaacaaacttaaaaaaaaaaaaacagttatcccccaaaaaggctgattatttacttcaccccaaaaaggaatcatttaactttttcaaatttatttttatttatttatttattttaaagatggggtctcactgtgttgcccaggctggattcaaattcttgggcttaagcaatcctcctacctcggcccctcaaagtgctgggattacaggcatgagccaccatgcccggcctttttcacatttctaaatgccttttattactatttcaaatgccagcaggaatacagagataaaaaagcaaaatcttcaaagcctagtccaggtctcacttggcttgttttagatgtttgcctacagcagtccaagtggcattaccagtaaagccacctggattcccataataatgcagatatgtaagatacacagattattttagaaccccatctttgcctttgttgttttgtttttgttttgttttgttttgtttcattttataaaatgatgtcttctagggaacgtgtctacaatctgaaatcccatctcataacctggcttccccttgtgatgacaaatcttaaatactgtatatttataattggcttagggggaactggtaagcctcgaacacagaaacatgagcttggtgccatcagagagtttgctttttatatcatttattttggcctattggcagaagaagaaagagacggacattgtgatcactcagtctcttagattagagaggccagctagtattgtggccataaaaaacctactcagttttcagagtcaactgtctaggtcttacattgcaatataaataagattaagttctgcctgcctgcatgacagcagcatgtgccatgggtcacgtggggggtataatgaccttctgcctctgttcataggctgtgctactcatggacgccgaaaagcgtatccggttactgcagtttgtcacagggacatcgcgagtacctatgaatggatttgccgaactttatggtgagcaggataccattggattcagttgtcctcctgggaatttccagccaggcatgaactctggcccaagaaccctgccgccaggcctctgcagaaggctaagtttcaggacagtgtgccatgcataggttccatgaaagttcaatgaaagtactgttatctatactttatatagataacatggtgcttctacttcgagggattggggggcagtttgtgaagaggtccataaggctgctcttttttttttttcctagtttagttttttagtaaatcgttaaaaactaggttttgtagggtcatttatatggtcgtaaactgaggtataaagtcacctccagtaggcagaatttttcagtgtttaccatagatttaaaaatcactctgtactttgcatactgaaagtcacatttcattcaccctcccacccacaaaactagtttgaagtttaaatttccagggcccagctgagaggctgtagctgcctgcctttccacgtaactgttgtgtttgttaatcttggtgcagttccattctggagactaagcagagtctttctgtgaggttgtgcagacctctggcttccctcaacattaaatatcaatgttgcagcagaagagagtgtcttgggcctcacccctgggggcaaaccctgccctgacagtagctggactgcagaccacaccatagcttcattcttctgccccaagcaatcttaacatttctttttcttttcttgtctaggttccaatggtcctcagctgtttacaatagagcaatggggcagtcctgagaaactgcccagagctcacacatggtgagtgacaaaaacacatgcatgtcaatgcaatatctgaactgcttagctgggtatggtgctgggctcaaggctattgaatgctctgtttcctgtctgtaagtagcttagagaattaaaggacagtgatgtggatgaaaatagaaattgtacagtagtgctaataagacataatgcactcagtatgtttggcacataaagggctcaggcctccctgctgtggggaatttctcctctgagcccagtccttccctcattattctaggtagtggagctttcactgttcagcatacatagataaggcagctctcaacctgtataataaacacgttgggtttttactccaaccttaaattggttgagaagttaggacaaaataccctgtagaaacatcctttttcaaaggccttctatgcccatgaataacctgtaattccctggaattgagcagtaacatgactgtggtcggaggagggtaagagggctgacacgtggccagggatgcccaagcgtggagcgtggctgccctcagaaggccctctcaggaggcacagtgacgcagaagggtcccagttgttttctgaacagttgcatgaaacccagcacaaatgcagactggatgggatcagtttcttgaagccgggttcagggagctcttgctaactcaaactcccatgtccctcgtgttggtttttctgcaaaggcctttatttcttgctcctgaggaagcagcagaagtgggccttctggaaaacggtgagcagcgtagccctgtgtttctcatgcagcgggggctgcaaagcctgctctggccatagtgagctaacataagcaaccaaacactccctgcaggaaacgccctcccttacactagaagtgctggccaggagagaattctcatgaacatgtgtttgcgaaaaattggctgtgaaaggtttttcacttctgtcggattcccttgcctcaccagaaaggtgttttttttttctattcgtaccattcacgtgactctccagatggaaacaatgtggtcattgcctgtcagagccttgaaagcaagctgactccagcctaaaattcatgaatattcagagcagtcattgtccgtggttctctggctttattctaagggaagaatgtttgagtagttcagagcttttatccaaatggtgtccaagtcatatgtggttttctgggttctactggcctccatatgaaggcaccagcgttgagccaagccccaggactgtgggtggtgatgcgaaactcaagctcataatactaaccaggatgaagattaggaaaagcgaaattattgggcacagtcatcatctgtggtcaggcactgcttaatctttatggcagccttatgagatatgttattcccttgggctgtcagaaggctggcccagggctcaccagagtcacagattcccagatcacaggatttgaactcagagctaccagaattagagcctgcaccctttaccactacaccagatacactgcctctgttgatatacccactttctttttagacttttccaaggaaaccaaattagtgaaccaatttcatgttcattcagcccatgtttctctgtgacttcagggacacatatcttactattgaactgtcttttttatttcggagcccacatgattctgccacaagtagaacttcccagataagacctctgaactcagtggttctcaacctcagctgcatgttggaaccatctagagagccttaaagaaatcactgatgcctggaatttggacttcattggtctggtgtgtgacccaggcagtgggattttcaaagctccccagatgatttttataggctggcagggttgaaaattcacagctcttccctaggaagggcaaagatccacctacaggaagggaacaacccagctggctcttaccagaacttattttcctctttatgtgtcacggaaataaagcaactgtgtagttttcctaatgatgttctccccagactaacttgacccggatggagaggactggcagttgcaagcaacactggctagcatgagtgggactgttctgctgtttcttctaaatggctttcctccctacctgaccctgactgtattttgacataggaaacagaaacttcactggctgtttcgtggcaacagttctgccataaaattttgccatacataggtttaatttcttccacgttttatgatacacaattaaagttcagaataaaaatctgatttcctagaagagcagaagctgaaggatctggttctctgtgatgagggtacctttcattaagctttccaatggtgattattgagtgtctgacattcaaaggacttcatttcattgttctataaaaggtcactactcagacatttaaaattactcttcattaagaatcacaggcccacctgcccttttaggtagactctaaagcaaacaaaaatcatctcgttcagcccatgcatcttccacgtgaggacgctgaagccctgtgaggacaatgagctccttaaagtcacccagctcattagtgcagagcaaagccaggtccgtgtgtcctgacctctgaaatgataggaactcacactcaccaagcactctgttcattccggggatggtgctcagcacttgatgcgattgactcataccatcatcacagtggccctaagaggtgggtgatgttatgacccacttttttacagataacactgggatgcaaagcggtgaagcattaagcagcatgattcagaacctcagatcttgacatcccgtctttgcctctctcttcatcatgccagtgtttctcaaacctgaataatctgtgcaccttttttaaagggaaaaaatggtcacagattctcaagaatgggcctgagacccccatagggattgcaggcccgggactgtgaaaccccagctgaaaagcctgaagccactttcggtgaaaggctcttttaaatgccatctgtagatgtgaagtcctgtctttattaatatgataatagaaagttaaaagcctgtattagtacttgctcttttaggattcctgggttcctgagaaccccagtttgagaagcacagtgttattctctgtcttttagtgtttagtggctgttagagaatccaagtggaactcagtgggacttattcaatatttagtggttgttaaacggccctctacggtatgtgtttcttttctgttgctgtgacaacggttagcttttagtatatgtgcaagtgctgccaaagcgagcacgtgaatggttagcttttaaaacccaagaagttactttgctcattcttggaatcacacatcaatacctggagggggcggttttaaacacagtttgagcactcgcggcagaggcagcacaagtgcacttcaagagctgggctttggagcaccccagggctgtacctggccccgtgtgaccttgggcaagttacctaaccttgctgtgtctcaagctcctcctctgtgaaataggggtgaagcattagctgccttacaaagtgattgccagggttcataacattgagacaaggctgatggggcatggtgagcactccatgaacatgagctcttacgtcataatgagctgtggcaagtgtgcatgccattttcatgacagatacacatcagcaatcaccccccaacacatacacacacacacagaggtgcaggttctgtggctaaaggctctggtcttgagccccatgtagacatacagtaaatgttgaaaggtgttaacactgataccatctcttgagtaattgagcccttgctgtatgccgggcccactgatccgatccacttggcactcatatgtgcagtttccccatgtcacagaagcacagaggccatccatttgtctgaaaaccctcactattgccagggcgatttgcagcccccgcccccacctgaagcctccagatatgtagggactttttctaaatgcaactttacatagcaaatgtcaattttgcctgactttgatcagaggaggtagcttagcactggtgttcccgagccccggacagcctgggttctgtttgtgggtctgccgtttgacaaagactgtgacctcaggaaccttgccctatgtctctgctccaggagctcctgtgcagaatggagataacatgacctgcttcatagggttgtgatgaaaatgaagtgagttaatagggagaaaagcacttggcttgaggcctagtgtggaataagtaatagtattagagatagacacagtcttaattcgtgggtaactccaaaagcatcagctctgtgttccaagggtttggaaatcttgccggttactcccttcccaccaggattcctccgagatctgcatctgactatagcaaaggtttcatggaccatttgaaaatgttctttctctgtaaattacaagagcttatttagtgtggatgtttcatagctagaggtttttggggtttttttctccaggtaatcaaaattgttggttaaggcttttttattctcttactcaaacctcatgccctattaaccagatcgaggaagtgctgttgtggcttttcacctacactttttgttccttttgcagctttaatcgccttgacttacctccatatgaaacctttgaagatttacgagagaaacttctcatggccgtggaaaatgctcaaggatttgaaggggtggattaagcaccctgtgcctcgggggtggttgttcttcaagcaagttctgcttgcacttttgcatttgcctaacagacttttgcagaggcgatggcagagagcagctgcaggcatggtccctggagccgagccttcaccacgcactcgtccaagttcggatgcgggaacctggtcccagcttgagttcctgcctttcccaccacaaattatcaactggttgatgtgtacactaattacatttcaggaggacttaatgctatttatgttgtgcctctgcaggcaaagcccttaataaatattttacatcctttctaatgacaatgaatggaattaatcactcaacaggtatagtattacgactcatgtttactttttaaaatgatttagaccgattttcagattttatttcgttatgattaaagatgtctcatgtacttggaaaagtgagcatttttttttttttttgtatttcactttcataccaggcttaatgtcaatgacatttttatttttgaagtactctgacacctccaccctctactttattagaattggaaggcaaatttttgtccaaaaacctacagacaagtactttgagagaatttccaatataatattagacataatgataattttttccatactcagaatgaaaaactggatattacgtttttgttttggggtttttttgtacaaatttagctaatagctacaggctgagagaattgtaacatagcatgacaaattttgtgttgacttgaaaggaatcacaccattattccttagaagtaattacatgtgttctaacacatttgagacagggttggactcccatttctcatccgagaaattacttaacccttcctggcgctgtacagtcatcttttattctatttcctctttgctgtttgtagtagagacattttgaatgaaacttggcactgcttgattcaaaactgtggaaaccagatctgtttagtctcctgtttgtatgcgtttgctaatggtagctaaataaccagtttttgttgtaaatgcaccaattctgaaggcactttatgtactacatggaggtcatatctggttttgtttttatttttttatcatgaacattaaatgtgatgatgatttcttttccctgcacacatctttccggtgcaatatctatcaattgtgaatctggctgctggtgtataaaaacctggatgtaaagctgagcctacagacctgtcctcaccaactgttttgtgatttctactcaactacaaagatttatttaatgtactcttaatctaactgagttttgttaccaatgacctgttgcatgcttcaataccgtgtactgcctgagttgtgcctcttgtgtgctagattaaaagtgagacagagacttgacttgatcctctgagctcaagctattgagctggtagtggcagaggactgagggtacctgcacagtttgattcttttccacgtgtaagtctccattgcagaattgtcgtgctttgagaaaacacctgaggcagtgtgggagttgaacgaccctgctgtcctttttaacctgtgttgtcctagaccctgtcggggcagtcaggggacactagagatttgatctcatgcgagtcatcaataggacaaaaaagttgtggtttggggaggtctgtttgttacataaaaaggacctttcggtgtaagaaattgccgtttttaccctgccctggctggcatgtgagaagccatggaaggttgtggttgtaaatgagttgtctaaaggggtgcagaggcctgaggtttctaaaagaaggtagatttctacagagctgagtgttggttcctttttcttattggttgaaaattacctggtagtgatcagaaaacttagatgctatgtaactaaaaaaaaaaaaaaaaaaaaaaaaaaaaaaaaaaaaattcccgctcatgagttttgactattggtgagatgttttccgctacagttaacatgacaaatgtctcagtggcaaaaatcccctttttgtaagcccccatagtctagaggcagttttctttttaagaatcatgccagagcctgagtcgagcagtatgctttcttggtttttgagagtaattgtgtaattgtagagggagaaatccaattctaacctaagaactgggattcttctgtcatcttgtaaaccgtatattgaaaaaaacagaatgtcactaaatgcatattaagtcaagtattggaaagtataaaagaaaaatcattctgacaatttctaagccagaagcaaacaagaattactgaaatctaccccatgaatacttggaaggcagtaattgtgagtgacacctcagttcatcaaccccttaataatatcagcttaattttaatgacaactaaatatgctgaagtgaggatttagtattttttaaaaaagcaaaacaaggttcagtagtcctcagcaattctccaagtttctctctttgcctaaaatggtcatagatcttgatttctctgaatcgtgatgaccacacccagtcatcttcacagcataattgcaggtggcagtaaagagagtgtgctgggtaaggagcagttgctgggtcattccttgggccccgacctgcccggggagtagccctgggggagagagggcagtgttgcctatcccagaggtcccagcagtcacactgctctgcaggccgggctctctttatagccagagaaatcaccttaatgcagtctctttagttgtctgctgaagctgtagttattatgggccacttacatgaggctgagaagtacgtgccggagctcacacactgcctgttgcggttctcttaacatcagttatcacagctgcctgtgggtcccgggtatttccattcctgccccttgttggcccgaggaaggatgtggaaagagcacctggtgggatgaaggtccaacagcctgtgcctctccactgctggccctggagccggcagcagtgaggcattcattgtctgtgttgcggtgtattcccagcttcagtgctcttttcctttttgcctgaaatgtttatgcttctctgcagccagtcctctaacaaatctcaagaacaaaggtaagacacttggtttttgtttccaggacccttcagaaggtgacatcagatattccctaaattcagacaatgagggatacagagcgacttggcatgtattatttctcccatgtaaggacaaagggacagattattattgttatttctgagacagagtcttgctctgtagctcaggctggagtgcagtggctcaatctcagctcaccacaacctctgcctcctggcttcaagcgattcttctgcctcagcctccccgaatagttgggattacaggcacccaccaccacgcctggctaatttttgtatttttagtagagatggtttcaccatgctggccaggctggtcttgaactcctgacctcaggtgatcctcccgcctcagccttccaaagtgctgggattacaagcatgagccaccgcacccggcctcacagtgacagattctgagaaacagcatgcaaaacatttgaaccattttctacatctcccattgttgcatagagagtgtgcaccgctgctatcttgccagatccacactggtcctcccgaaagccaggttcatacacagcaactttttaattattctaacagttacccattaacagtcgactcctgtatttctgagagtcttgtactcacctctgaaatttaaaaacgtataaagagagcctgggttaatcagttctgcagcccctacgtgacactgtgctagttctccttcttctgtctcctccttaccctggccctgcacccctgtacttaagagggagaggtgggaggtgctgtctggtatcatttgctgcctcgccagtagagggtgccgctgtgcagggtaactgcccgcctgctcccttcctgacctcccctgaccccgaagatcactacctctgtcattcaggcattggggtacatcctgataagtcgtgtcagaactgccaatttcaggactgagatgtgtttttaaaaaacaaatccttataaactccactttgtactttagattttaaaactggggaaaaatgtgatattctttggaccacttttttaatttatataagccttaatgaacagtgtctatacatttgcatacacacacccccaccccagagtgttctcagtatgtcagagaaagtgccacagcattaggacgggagcttggagaacgttttctagaaaagggttagcttcctgttggcatgaaattttccaagcaaacctcattaaacatctgttgtttgttaaagatgttccactgaaagcaacgcatgtttcaaaggcacgtctttccgttcgttggttttctgtgtgtaaggagtagcattgctgttggcgcctaacctcgcgtgcactgcattctcaaccccgtaccagtgcatcatcagaagccttcctcgtgaccataactctgtgtctgcagatatgtgttcccgtgtaagccagttttccccttttactcagactgatttcacctagattgtcacggtttccttcatgttaactttgcgtgactttgttcttcctttactactctgtatgtaatatatatacatatatacgtacatatgctgtccaaatatatttgtatatatttgtatagcatttttacacctttattgagtaatctggtttcgaaaggaggtgagagtttagtcccttctgcagttttctccaagctgtgtcctgtgaatttcaacccttggagcctaagaaaaccctaggaagatgatgttaatttgctgtcatttcctaattcaggatctatcatcaaatgaaacatgaaaaaaacagtgacttttaaggtgaaaagagtttcaagcattccaaataaattatcaatgtttcataactttttattataaacccacctcctaataggaagccaagtactatttgatacagtggtaaaaaccaaactaccttgaatttttttaaggcaacttatgaataatgctcattttcacagtcagaatagctttaaaatatggttgaatttgatacacacaggaagttttcttgaagaacaatcctttcgcttttcttttttcttgagagatctaaagagaaactgtagattgttttcctgacagcaaaagactaatgtgacaaaatgaagtcattgtaaagaagcgatgcaacttgtcaaatatttaataaagaattatggaagctggaacattttctacatcaagtgttatgggttgtttgatttaaagcttctttgtgaatgcaccatcttaattgttgtcagaggggtttaaatgcctgcagatttatagtatgttcatttccttcatctccctaaaagcgccgcacttttaaaaacattaaagtctggcagggcacagtggctcacgcctgtaatcccagcactttgggaggctgaggtgggcagatcactgaggttaggcattcaagaccagcctgaccaacatggtgaaaccccatctctactaaaaatacaaaaaatatatatatatattagccagacgtggtggcgcatgcctgtaatgccagctactcaggaggctgaggcaggagaatcgcttgaacccgggaggcagaggtttcagtgagctgagattgtgccattgcatgcactccagcctgggtgacagagcgagattccgtttcaaaaaaaaaaaaaaagtctgcccaaaacacatggcttaagcctactaaaaggatgcacatttattcttatccgtctgctgttttgttcttttattaaacttgagaattactgattttacgtaacatttgtataatccatgttagtctgttcctcaaaaggcatccttgtatacctagccctcaacttgtgtgagagttaataagactcaataatgaatccccaagttgcttctcagaaaggtgctgtcagaatcccgaccgtgtgtcactgccctgtgcaaagccggtggcatttttcctcatgccatttcattccgctcagatcatctcagactcctggagaattttccctttttctttagtactgagcttcctcttgatgtgcttaacccatcccctcggggcagaggagatagctagcggggaagcaggacatcatttagtctttggtttcttgcggcttgtctttttccattaacagtagatggcatcttgccagaaagctgtccgcagcacttggaattcctgccgcctcctccagggttatgagtacacatgagaggcacaattggacagagtcactgtgaatatttatatgttctttcttaaaaccacacatggtggaacgaattacatcaatgacacagttgctagattaatacgcttttaacctgctctgaagtccaagactcattaggcacttgtgagatggtgaagcccctggtaaaagtgtttgcggtgagcatgggtatcctgaattctgacactagctttctcggggttggctctcagagccatgttcaaaggggttcctgaggtaagaacgcagaagcctctttctgggagagaacacttctcaaaacagcttccagagagctcaggctgtagaatctctgaggaatcatttataggacttgaactgggctggaaaaaatttgagcatgagtttacttaagacccaagacacagtccttggtaagtaggccgcagtgcccagatgtgacccagtggggactcaagagggcaagaagggagagtccctgttgggaaccttttagggctgaccttaggccagactgggaaaaaggtcagtctccccaattagcctgttgctgtgttccttcctgcccagcccacttcacagtgccccgtgctgctcatgtgcctcctcccctttcctctgcaaagttcccagctgggctgcaagtctcgggtacctgcagtgttgacagcgcagagccctcccgtcacctccaggcagagtggccctcacttcacaggggcctcctggggacaaggcgtcctgagccctccgtgcttccgggtgaaggtcagagactgtccctgtgtcacgttctcccaggcccactcaaagcacaaagttccacaaggggttgtggctcttccaggtcctctgctggtcttactgccttggtgtttgaaatgacgactgcaacaacttcatccttttcttggccaggtgcccccagaaactaccttttcagatatgcccttttaccagggctccaggccccctccctcacagctctgcagccttgctgcacagttccccatcggaattgtgaggggagaccgtgtttcctccacatgcttttgcccactccccacatcagttcttggagtaagccttttttcctctccaaggaaagggcttacttgcagacgaattagtttggaagtacagtactagagcaagcacaaccccaaactgagcagactgaaactgaatagggcccagaggatgggtgagagccacattcctgtgattaaaggcagatttgggtggtgtctaagcaatacccttcctagggagttttaaatactgttgctagaatcagggagtcgagttctcaatcctgtttggccttatccagactgagtaccaaggctaaaggcagaaggttctgcgctgcagagtgcccaggtgtcagcggctcgaatcacgtgatcgcagaatatgtggccctgcagggccggccttgctttgtctaaacgctctcctttttcatgtgagtcccggggttcttgcccttgatcaatccagatatgaccagtactgtgggcctggagggccaggttttgttgtcatttgtggccttggactctgctggggcagccttgcctcccctgtacagacccagaacagctgcccctgtgggcgcttctcccagctagaaacctgagggctgatgggcgaaggtggttggcttccgactgcccccgtgggccgcggaagcgggcaggacctcattcaccccaccacctccaccgaggggcttgtctgcagcagaggggctactcaacattgagctcaggaagggaggccaggaggctgcatgaacggcccagcctgggcagttgggggcagcggggaatggacagaccaccttggcctggaggtaaccccagcagagacacggccagcagagttccatccttccgcttcccagttcgggcagaaaacccaggttttcccaggaaatctgcaagcacattaagctggtctctcctttaaaaaggtgcaaggatggagacagtcctacctgtcctgagcaggatgggccctgtgccaaggggccaggcagtagcaggctggcactctaggtagggaaggggccaaggatccccaagaggagttgacagcaagataatttaaagagcgtaagtaggccaggcgcagtggctcacacctgtaatgccagcactttgggaggccgaggtgggtggatcacctgagaggtcaggagttcgagaccagcctggccaacatggtgaaaccccgtctctactaaaaatacaaaaattagccaggcgtggtggcatgcgcctgtaatctcagccactcgggaggccgaggcaggagaatcgcttaaacccgggaggccgaggttgcagtgagccaagatcgcatcactgcactccagcctgggtgacagaacaagagactatctcaaaaagaaaaataataaagagcgtaatctacctcctgtaacacatcatcccggcatgggagtatatcttggcaaacatccgcaagaaattttgtctttcaggacagggacaagagcccaccatgccctctgggttatgccttgtcttcctcaaaattgaggagaagcccttgagctggagcaagatccaaaaagctggagcaaaaaaagcagtaggtgggaattagggccctcgtaccccggggcctgctatactctccagtcctcaatcttcgaacagtgaaccccgagatgtggagctgggggagctggccctgaaggccgagacaagcctgcagtccacaggcacgggcccgggactgcccacacctgttagatgggcacaaacggggccttcgctgcccggcaccaatctcctcttgcactggggccctgtttccatgcagtgccaggggcctcaatcattagctctttcagtgtaatttgcctcttttggtttaaaatagtctttgggggataaatattcaatttctagattaaactccttgttgaggctctttcctccggaggtccctggtggatcctcatgggacaggctgaggcgggctctctcctcgggcctagggtgtcatgctctttgtcccctgaatggggtcgcaagtactccagggccatcctccagggacatcttgctggcctctgtgatgctcacctgagccccagctggtcggtcagccctgaggctctcagccatggggtcaccctgccctcaccacagcctccctttgtggcactccagcagggccctcagccctttctgcctctctgagctgctcacctgcacctgagtgagcagcctccaagccacctgccagagcctcccacggggctgggaaatacctagtggcactcaaaagaaaagggaaggaaatgggaacaataagccaagctgccgtggagagtttatcttcagccttaagcatctttttacagagtgaatttcccctggggacagtggtcttcctgccatctgccaagcttctggggtcttcagtttaccctcttataatatttccacaccagcctaaagaggtagatattattagcaccaatgtacatacaaggaaacagactaggaggttaggagactcgcagagtggtactctgaacccaggttgtctggctcaaaggcatcatttaaccaccaactctactgcccattcactgcccctccatcaaaacctcctgtctgagaaaccagagtgtcaagacagaagaaatcatcaataacactgaaggcagcacactaaaggggagaaagaagactgggaagtggtcgttagatgtgaccacctggagatctgccatcctactgcccacacatcctgaagaacaataaactcattcgtactaagatgtgaatgactgataggctaaacacatgacccttccagaagaatttttattttaacaaataccaaaggtgatgcttggtttatatcaaaaggaataaagatcaaaattatggcatttatgtcccagcaaattggggagggtttttttttgtttttttgtttgttttttgttttatttttgttttttgttttttgtttttttgagacagggtctggctctgtcgcccaggctggaggtcagtggcgcgatctcggctcactgcaagctccacctcccgggttcacgccattctcctgcctcagcctcccgagtagctgggaccacaggcgcccgccactatgcccagctaattttctgcatttttagtagagagggggtttcaccgtgttagccaggatggtcttgatctcctgacctcaagatccacccgcctcggcctcccaaagtgttgggattacaggcgtgagccaccgcgcccagctggggaggtttttgagggtagggggcatacttaagtttacaaaatccactgacgccagtggaatacgggatgccagcacagtgggaaaagacagcctgatctctgggacagccccagtttcagcacttaaaagacactgcactgcctttctggctgccacaggacagaaccccccgcctccctccagcctttcccacaccacaaaacaagcatctaatattttccagggaccttccagggacaacacaaacttccctttgtccaacagaattgaagggtgaagggaccagagactgaggactggattttctactcccaggaactccttgatggagctctgagatgctgaattttttaaagagtttctgttattaaaggattttagatattaagttgtaacatacagtcatgcaccacatagacatctcagtcagcaatggactcccatagacgatggtggacccgtgagatgataatggagctgaaaaattcctgttgcctactcatgttgcctagtgacatcatagcctttgcaacccatcaccctttctatgtttagctacgcttagatgcacaaacccttatcattgtgttacaattgcctgaacagaacagtcacatgctgtacaggcttgtagcctcggagcaataggctggaccatatagcctaggtgtgtagcaggctatgccatccaggtttgtgtgagtacactctgatgtttgcacaacgatgaaatcgcataacaacgcatttctcagaatgtgtcccagttgttaagcaacacatgaacatgactgtatttaatattgtttatagcagaaagttagagtttgggatttgtcttttgaattctagttatgtagctctcttagcaattctaagactctgccactagggtcatcaccctccctcacaacccctctcaccatgacctcaacccccatcctggccccctcttgccttctctgcattctatatttacttagaagatccttgcttgttcatgagttgagattgtcagggggacatgccctccgcaatgtaatgagtgtttaaacaacagtcaggcctttgaaccccaggctccagttaaaaagtaacaggctagatactgaatcaataggaggcaaatattagctacggaggctgagagagaccgagttgggaaacacttgttgctggtgacatgcaaagagcaatggccatacccacctgaggtccaggaagccctgggagccccatgaccttcggcctgtcattgtcctgctctacatgttgtaacattgaagccaccagcccttaattagcttctagacctccctcagtctggacttctgcaatatcccactaaatggtgtccacctgatttttccccttcccagccatcttacactcatgtgagcctgcttccagcaaactctgatcttgtcaatcttctgctggaaaattttccatgactccccattgcattcctgactggtgcgcaagggcatctacctgctctttgggacgtgggcagggggatggcagatctccaggtggtcacatctaaccaccaattcccagtcttctttctcccccgtagtgtgctgccttcagtgttatcgatgatttcttctgtcttgatactgtgtctttggtttccatgacatttcaatcttctggttactctctcactcttcaaatactcctactattttttctcctctcctaaaggtaggtgttccccaataatttgttcttggtgagctctctctctctctctctctctgtgtctctttctccttttcctcctcctcttcctctcatggcttaagttagtacctccatgtggacaattcccaagtgtatctctagccccagcttctctcagggccctcgtctccaaaagcctaatggactcatcgtaggacattcctcaagtcacccaaactctaaatgtcccaatctgaactcacacttttaaacctctcctcctccgtatttccaaatctctgggagttgttctcttgtatcttccaggcatccacactggaacttcctcagtgacctttcacatggttttgctccctaggttgaaagagtgacaaagttcagttttctattcatgcattcactcattcattcaacaaatatgcattgagtgcctgccatgtaccaagcactcgtaggggttaggaatacagcaattaaaacaaaacaaaagaaagatcacttccatcatgagatatttatatgtttctcatttagttgcctccactagaaatatgtttctcatttagttgtctccactagaatatgtaagtacaatatatggtgtgttaaatgttgatgaagccaggggaaaaaataaagcagacgaaggatccaggtagtatgggagggtgcaattttggatggggtgagtcagggtaaagagcaccaggaggtgagtgagcaagccatgaggctttgggcagagaaacagcaaatccagaggtcttaaggaggaacaggaaacaagatagagcccctttgggactataccaaggtgagccatctgttagccaagtgaagggtcaagtagaaagtggaaggatcatggatgtcaaggaggtccaggctggagctaaagcatcatcagcgtgtatatggtctttaaagctgtggcactgaaaaggaggggtccaaggacaggagcatgagatggatccaggaaaggaggagtggccagagaggtgacaggaaaaccaagagacagtggtgaccctggagaaatttggctgggaggagagagtttatttatgaaggacagaccaagcgtggtatggcctgctggtaggtcagcaagatgaggactgagaagcgacaactggaattatcaatgtggatgtcattggtggccttaataggagagattttgctggaatttgggggcaaatgcccccaaaagaaggggaagaggaactggagacagggacacccatcacagctcaggcatctggattcttaccttcatttccaccccctctccaccttgcttgcctctgtaactgctgcccaagttatgacaataatgtcctgactgtacctcccacttgttcccttcccagttcccagtccagtttgcactggtgcagcccaactccaatatctacattctcttgcagaaacccttcaaaggcttgcctgtattgaccaatgaaaatgaaactaaaatctacactccttatgagcaagggcattcaaggtcaggctcataactcaccttttctctacgctcctatagtcacatcaagggaaccgttccatccccatgcagcccttgcattgctaccttctcgcctgtgctcccaccactctctctactcagagtgaccttcccatatatccaaatctagccaaccttcagggcccatctcaaatgtcacctcctccatgaagccctgcctgattcacctcaccaaatgaagttccaaccctcctctgagtttacagcactttgtccctttctgtctcttattgtggttattagtatggctatctccatcctatacatcacccgaagcacctgaaagcgtggggctaaatcaatgctctctgtaccttggatgctcaataaaactgccttacagtaaactagatggtgctggggaatggggatggggtggtgtttctggctatagggaggtttgggattgtctgtagatttctgtttgcggatctttgctgtttcctgcctgtgtgtgttcctgaataaacagtcagacactggccaggctgccgaggattgcccacctcacaaccctgacagaggggccgggttgactacaagacagtcatttggggctgggagtctgaaggagaccgagttgggaaacacttgctgctggtgacatgcaaagagcaacggccatacccacctggagtccaggaagccctgggagccccatgaccttgggcctgtcattgtcgtgctctacaggtgattacagaggctcacacctgtaatcccagcactttgggaggccaaggtgggagtatcacctgagcccaggagttcaagaccagcctgggcaacatagtgagaccccctcaaatctctacaaaaaaattttgaaaactaacagattagccaggcatggtggtacttgcttgtagtcccagttattccagaggctgaggcaggaggattgctcaagcccagaagttggaggctgcagtgggccatgatctcaccactgcactccagctgagggacagagcacgaccttgtttctaaaaacaaaagtcaggtagagtctctgacaagagtgcaaaaggggaggcaacgtgacagtcgtgaagacactgaaactgcaggaaatgatctgagacagtcacgctgccttggcctgagtgttttggtgcctgtcggctctccgacattggaaaggtttcctgaaaagtagcaaatgaatgagctgccttttttgctctgcctctcatacttacagacacaatttccaagcctcctggtctcagcaaaaatttagttctccagagatgccagtttccctggaggcctccaggtatccgagccacacttggctgtccgtgcagaggtgcctggcaaatgactcctggtggctgcttagcgatctttaggttttcactgaggatacgattaagggacctagtgtttgggaaaggaggcagccctggagg

SEQ ID NO: 103 - DNA, 8218 bp, Homo sapiens
gggcactgctttaaaactgggaaggaggaagacgaggccagggagccggagggtcaccaaggtagatttccagcagcgctagtccagctgaacactttccagccttgtttttcagcagctttgaggaaaagtatagtgatccgtatgtgaaactttcattgtacgtagcggatgagaatagagaacttgctttggtccagacaaaaacaattaaaaagacactgaacccaaaatggaatgaagaattttatttcagggtaaacccatctaatcacagactcctatttgaagtatttgacgaaaatagactgacacgagacgacttcctgggccaggtggacgtgccccttagtcaccttccgacagaagatccaaccatggagcgaccctatacatttaaggactttctcctcagaccaagaagtcataagtctcgagttaagggatttttgcgattgaaaatggcctatatgccaaaaaatggaggtcaagatgaagaaaacagtgaccagagggatgacatggagcatggatgggaagttgttgactcaaatgactcggcttctcagcaccaagaggaacttcctcctcctcctctgcctcccgggtgggaagaaaaagtggacaatttaggccgaacttactatgtcaaccacaacaaccggaccactcagtggcacagaccaagcctgatggacgtgtcctcggagtcggacaataacatcagacagatcaaccaggaggcagcacaccggcgcttccgctcccgcaggcacatcagcgaagacttggagcccgagccctcggagggcggggatgtccccgagccttgggagaccatttcagaggaagtgaatatcgctggagactctctcggtctggctctgcccccaccaccggcctccccaggatctcggaccagccctcaggagctgtcagaggaactaagcagaaggcttcagatcactccagactccaatggggaacagttcagctctttgattcaaagagaaccctcctcaaggttgaggtcatgcagtgtcaccgacgcagttgcagaacagggccatctaccaccgcccagtgccccagctgggagagcgcgttcatcaactgtcacgggtggtgaggaaccaacgccatcagtggcctatgtacataccacgccgggtctgccttcaggctgggaagaaagaaaagatgctaaggggcgcacatactatgtcaatcataacaatcgaaccacaacttggactcgacctatcatgcagcttgcagaagatggtgcgtccggatcagccacaaacagtaacaaccatctaatcgagcctcagatccgccggcctcgtagcctcagctcgccaacagtaactttatctgccccgctggagggtgccaaggactcacccgtacgtcgggctgtgaaagacaccctttccaacccacagtccccacagccatcaccttacaactcccccaaaccacaacacaaagtcacacagagcttcttgccacccggctgggaaatgaggatagcgccaaacggccggcccttcttcattgatcataacacaaagactacaacctgggaagatccacgtttgaaatttccagtacatatgcggtcaaagacatctttaaaccccaatgaccttggcccccttcctcctggctgggaagaaagaattcacttggatggccgaacgttttatattgatcataatagcaaaattactcagtgggaagacccaagactgcagaacccagctattactggtccggctgtcccttactccagagaatttaagcagaaatatgactacttcaggaagaaattaaagaaacctgctgatatccccaataggtttgaaatgaaacttcacagaaataacatatttgaagagtcctatcggagaattatgtccgtgaaaagaccagatgtcctaaaagctagactgtggattgagtttgaatcagagaaaggtcttgactatgggggtgtggccagagaatggttcttcttactgtccaaagagatgttcaacccctactacggcctctttgagtactctgccacggacaactacacccttcagatcaaccctaattcaggcctctgtaatgaggatcatttgtcctacttcacttttattggaagagttgctggtctggccgtatttcatgggaagctcttagatggtttcttcattagaccattttacaagatgatgttgggaaagcagataaccctgaatgacatggaatctgtggatagtgaatattacaactctttgaaatggatcctggagaatgaccctactgagctggacctcatgttctgcatagacgaagaaaactttggacagacatatcaagtggatttgaagcccaatgggtcagaaataatggtcacaaatgaaaacaaaagggaatatatcgacttagtcatccagtggagatttgtgaacagggtccagaagcagatgaacgccttcttggagggattcacagaactacttcctattgatttgattaaaatttttgatgaaaatgagctggagttgctcatgtgcggcctcggtgatgtggatgtgaatgactggagacagcattctatttacaagaacggctactgcccaaaccaccccgtcattcagtggttctggaaggctgtgctactcatggacgccgaaaagcgtatccggttactgcagtttgtcacagggacatcgcgagtacctatgaatggatttgccgaactttatggttccaatggtcctcagctgtttacaatagagcaatggggcagtcctgagaaactgcccagagctcacacatgctttaatcgccttgacttacctccatatgaaacctttgaagatttacgagagaaacttctcatggccgtggaaaatgctcaaggatttgaaggggtggattaagcaccctgtgcctcgggggtggttgttcttcaagcaagttctgcttgcacttttgcatttgcctaacagacttttgcagaggcgatggcagagagcagctgcaggcatggtccctggagccgagccttcaccacgcactcgtccaagttcggatgcgggaacctggtcccagcttgagttcctgcctttcccaccacaaattatcaactggttgatgtgtacactaattacatttcaggaggacttaatgctatttatgttgtgcctctgcaggcaaagcccttaataaatattttacatcctttctaatgacaatgaatggaattaatcactcaacaggtatagtattacgactcatgtttactttttaaaatgatttagaccgattttcagattttatttcgttatgattaaagatgtctcatgtacttggaaaagtgagcatttttttttttttttgtatttcactttcataccaggcttaatgtcaatgacatttttatttttgaagtactctgacacctccaccctctactttattagaattggaaggcaaatttttgtccaaaaacctacagacaagtactttgagagaatttccaatataatattagacataatgataattttttccatactcagaatgaaaaactggatattacgtttttgttttggggtttttttgtacaaatttagctaatagctacaggctgagagaattgtaacatagcatgacaaattttgtgttgacttgaaaggaatcacaccattattccttagaagtaattacatgtgttctaacacatttgagacagggttggactcccatttctcatccgagaaattacttaacccttcctggcgctgtacagtcatcttttattctatttcctctttgctgtttgtagtagagacattttgaatgaaacttggcactgcttgattcaaaactgtggaaaccagatctgtttagtctcctgtttgtatgcgtttgctaatggtagctaaataaccagtttttgttgtaaatgcaccaattctgaaggcactttatgtactacatggaggtcatatctggttttgtttttatttttttatcatgaacattaaatgtgatgatgatttcttttccctgcacacatctttccggtgcaatatctatcaattgtgaatctggctgctggtgtataaaaacctggatgtaaagctgagcctacagacctgtcctcaccaactgttttgtgatttctactcaactacaaagatttatttaatgtactcttaatctaactgagttttgttaccaatgacctgttgcatgcttcaataccgtgtactgcctgagttgtgcctcttgtgtgctagattaaaagtgagacagagacttgacttgatcctctgagctcaagctattgagctggtagtggcagaggactgagggtacctgcacagtttgattcttttccacgtgtaagtctccattgcagaattgtcgtgctttgagaaaacacctgaggcagtgtgggagttgaacgaccctgctgtcctttttaacctgtgttgtcctagaccctgtcggggcagtcaggggacactagagatttgatctcatgcgagtcatcaataggacaaaaaagttgtggtttggggaggtctgtttgttacataaaaaggacctttcggtgtaagaaattgccgtttttaccctgccctggctggcatgtgagaagccatggaaggttgtggttgtaaatgagttgtctaaaggggtgcagaggcctgaggtttctaaaagaaggtagatttctacagagctgagtgttggttcctttttcttattggttgaaaattacctggtagtgatcagaaaacttagatgctatgtaactaaaaaaaaaaaaaaaaaaaaaaaaaaaaaaaaaaaaattcccgctcatgagttttgactattggtgagatgttttccgctacagttaacatgacaaatgtctcagtggcaaaaatcccctttttgtaagcccccatagtctagaggcagttttctttttaagaatcatgccagagcctgagtcgagcagtatgctttcttggtttttgagagtaattgtgtaattgtagagggagaaatccaattctaacctaagaactgggattcttctgtcatcttgtaaaccgtatattgaaaaaaacagaatgtcactaaatgcatattaagtcaagtattggaaagtataaaagaaaaatcattctgacaatttctaagccagaagcaaacaagaattactgaaatctaccccatgaatacttggaaggcagtaattgtgagtgacacctcagttcatcaaccccttaataatatcagcttaattttaatgacaactaaatatgctgaagtgaggatttagtattttttaaaaaagcaaaacaaggttcagtagtcctcagcaattctccaagtttctctctttgcctaaaatggtcatagatcttgatttctctgaatcgtgatgaccacacccagtcatcttcacagcataattgcaggtggcagtaaagagagtgtgctgggtaaggagcagttgctgggtcattccttgggccccgacctgcccggggagtagccctgggggagagagggcagtgttgcctatcccagaggtcccagcagtcacactgctctgcaggccgggctctctttatagccagagaaatcaccttaatgcagtctctttagttgtctgctgaagctgtagttattatgggccacttacatgaggctgagaagtacgtgccggagctcacacactgcctgttgcggttctcttaacatcagttatcacagctgcctgtgggtcccgggtatttccattcctgccccttgttggcccgaggaaggatgtggaaagagcacctggtgggatgaaggtccaacagcctgtgcctctccactgctggccctggagccggcagcagtgaggcattcattgtctgtgttgcggtgtattcccagcttcagtgctcttttcctttttgcctgaaatgtttatgcttctctgcagccagtcctctaacaaatctcaagaacaaaggtaagacacttggtttttgtttccaggacccttcagaaggtgacatcagatattccctaaattcagacaatgagggatacagagcgacttggcatgtattatttctcccatgtaaggacaaagggacagattattattgttatttctgagacagagtcttgctctgtagctcaggctggagtgcagtggctcaatctcagctcaccacaacctctgcctcctggcttcaagcgattcttctgcctcagcctccccgaatagttgggattacaggcacccaccaccacgcctggctaatttttgtatttttagtagagatggtttcaccatgctggccaggctggtcttgaactcctgacctcaggtgatcctcccgcctcagccttccaaagtgctgggattacaagcatgagccaccgcacccggcctcacagtgacagattctgagaaacagcatgcaaaacatttgaaccattttctacatctcccattgttgcatagagagtgtgcaccgctgctatcttgccagatccacactggtcctcccgaaagccaggttcatacacagcaactttttaattattctaacagttacccattaacagtcgactcctgtatttctgagagtcttgtactcacctctgaaatttaaaaacgtataaagagagcctgggttaatcagttctgcagcccctacgtgacactgtgctagttctccttcttctgtctcctccttaccctggccctgcacccctgtacttaagagggagaggtgggaggtgctgtctggtatcatttgctgcctcgccagtagagggtgccgctgtgcagggtaactgcccgcctgctcccttcctgacctcccctgaccccgaagatcactacctctgtcattcaggcattggggtacatcctgataagtcgtgtcagaactgccaatttcaggactgagatgtgtttttaaaaaacaaatccttataaactccactttgtactttagattttaaaactggggaaaaatgtgatattctttggaccacttttttaatttatataagccttaatgaacagtgtctatacatttgcatacacacacccccaccccagagtgttctcagtatgtcagagaaagtgccacagcattaggacgggagcttggagaacgttttctagaaaagggttagcttcctgttggcatgaaattttccaagcaaacctcattaaacatctgttgtttgttaaagatgttccactgaaagcaacgcatgtttcaaaggcacgtctttccgttcgttggttttctgtgtgtaaggagtagcattgctgttggcgcctaacctcgcgtgcactgcattctcaaccccgtaccagtgcatcatcagaagccttcctcgtgaccataactctgtgtctgcagatatgtgttcccgtgtaagccagttttccccttttactcagactgatttcacctagattgtcacggtttccttcatgttaactttgcgtgactttgttcttcctttactactctgtatgtaatatatatacatatatacgtacatatgctgtccaaatatatttgtatatatttgtatagcatttttacacctttattgagtaatctggtttcgaaaggaggtgagagtttagtcccttctgcagttttctccaagctgtgtcctgtgaatttcaacccttggagcctaagaaaaccctaggaagatgatgttaatttgctgtcatttcctaattcaggatctatcatcaaatgaaacatgaaaaaaacagtgacttttaaggtgaaaagagtttcaagcattccaaataaattatcaatgtttcataactttttattataaacccacctcctaataggaagccaagtactatttgatacagtggtaaaaaccaaactaccttgaatttttttaaggcaacttatgaataatgctcattttcacagtcagaatagctttaaaatatggttgaatttgatacacacaggaagttttcttgaagaacaatcctttcgcttttcttttttcttgagagatctaaagagaaactgtagattgttttcctgacagcaaaagactaatgtgacaaaatgaagtcattgtaaagaagcgatgcaacttgtcaaatatttaataaagaattatggaagctggaacattttctacatca

SEQ ID NO: 104 - protein, 948 aa, Homo sapiens
ISSSDAEHFPALFFSSFEEKYSDPYVKLSLYVADENRELALVQTKTIKKTLNPKWNEEFYFRVNPSNHRLLFEVFDENRLTRDDFLGQVDVPLSHLPTEDPTMERPYTFKDFLLRPRSHKSRVKGFLRLKMAYMPKNGGQDEENSDQRDDMEHGWEVVDSNDSASQHQEELPPPPLPPGWEEKVDNLGRTYYVNHNNRTTQWHRPSLMDVSSESDNNIRQINQEAAHRRFRSRRHEDLEPEPSEGGDVPEPWETISEEVNIAGDSLGLALPPPPDGSRTSPQELSEELSRRLQITPDSNGEQFSSLIQREPSSRLRSCSVTDAVAEQGHLPPPSAPAGRARSSTVTGGEEPTPSVAYVHTTPGLPSGWEERKDAKGRTYYVNHNNRTTTWWIMQLAEDGASGSATNSNNHLIEPQIRRPRSLSSPTVTLSAPLEGAKDSPVRRAVKDTLSNPQSPQPSPYNSPKPQHKVTQSFLPPGWEMRIAPNGRPFFIDHNTKTTTWEDPRLKFPVHMRSKTSLNPNDLGPLPPGWEERIHLDGRTFYIDHNSKITQWEDPRLQNPAITGPAVPYSREFKQKYDYFRKKLKKPADIPNRFEMKLHRNNIFEESYRRIMSVKRPDVLKARLWIEFESEKGLDYGGVAREWFFLLSKEMFNPYYGLFEYSATDNYTLQINPNSGLCNEDHLSYFTFIGRVAGLAVFHGKLLDGFFIRPFYKMMLGKQITLNDMESVDSEYYNSLKWINDPTELDLMFCIDEENFGQTYQVDLKPNGSEIMVTNENKREYIDLVIQWRFVNRVQKQMNAFLEGFTELLPIDLIKIFDENELELLMCGLGDVDVNDWRQHSIYKNGYCPNHPVIQWFWKAVLLMDAEKRIRLLQFVTGTSRVPMNGFAELYGSNGPQLFTIEQWGSPEKLPRAHTCFNRLDLPPYETFEDLREKLLMAVENAQGFEGVD

SEQ ID NO: 105 - DNA, 8348 bp, Homo sapiens
ccagtcacagaggaagccatttccagagaggaacaaccgtgtagactgctttcctgggagtcaagttaaaacttctctcctgtgaccttgtcacccggcagtggaaagttacccttggctgcagccacgacttccgcatactcttcagaacttgctctgcccttgagttttccagctttcctttaatgcactaaacctttaatattgtattctcctaaatgagacgtctcgcatttgagcaggtaacactcgggagagtcccgtattctcagagtaaaagttgtttctggaattgatctcgccaaaaaggacatctttggagccagtgatccgtatgtgaaactttcattgtacgtagcggatgagaatagagaacttgctttggtccagacaaaaacaattaaaaagacactgaacccaaaatggaatgaagaattttatttcagggtaaacccatctaatcacagactcctatttgaagtatttgacgaaaatagactgacacgagacgacttcctgggccaggtggacgtgccccttagtcaccttccgacagaagatccaaccatggagcgaccctatacatttaaggactttctcctcagaccaagaagtcataagtctcgagttaagggatttttgcgattgaaaatggcctatatgccaaaaaatggaggtcaagatgaagaaaacagtgaccagagggatgacatggagcatggatgggaagttgttgactcaaatgactcggcttctcagcaccaagaggaacttcctcctcctcctctgcctcccgggtgggaagaaaaagtggacaatttaggccgaacttactatgtcaaccacaacaaccggaccactcagtggcacagaccaagcctgatggacgtgtcctcggagtcggacaataacatcagacagatcaaccaggaggcagcacaccggcgcttccgctcccgcaggcacatcagcgaagacttggagcccgagccctcggagggcggggatgtccccgagccttgggagaccatttcagaggaagtgaatatcgctggagactctctcggtctggctctgcccccaccaccggcctccccaggatctcggaccagccctcaggagctgtcagaggaactaagcagaaggcttcagatcactccagactccaatggggaacagttcagctctttgattcaaagagaaccctcctcaaggttgaggtcatgcagtgtcaccgacgcagttgcagaacagggccatctaccaccgccatcagtggcctatgtacataccacgccgggtctgccttcaggctgggaagaaagaaaagatgctaaggggcgcacatactatgtcaatcataacaatcgaaccacaacttggactcgacctatcatgcagcttgcagaagatggtgcgtccggatcagccacaaacagtaacaaccatctaatcgagcctcagatccgccggcctcgtagcctcagctcgccaacagtaactttatctgccccgctggagggtgccaaggactcacccgtacgtcgggctgtgaaagacaccctttccaacccacagtccccacagccatcaccttacaactcccccaaaccacaacacaaagtcacacagagcttcttgccacccggctgggaaatgaggatagcgccaaacggccggcccttcttcattgatcataacacaaagactacaacctgggaagatccacgtttgaaatttccagtacatatgcggtcaaagacatctttaaaccccaatgaccttggcccccttcctcctggctgggaagaaagaattcacttggatggccgaacgttttatattgatcataatagcaaaattactcagtgggaagacccaagactgcagaacccagctattactggtccggctgtcccttactccagagaatttaagcagaaatatgactacttcaggaagaaattaaagaaacctgctgatatccccaataggtttgaaatgaaacttcacagaaataacatatttgaagagtcctatcggagaattatgtccgtgaaaagaccagatgtcctaaaagctagactgtggattgagtttgaatcagagaaaggtcttgactatgggggtgtggccagagaatggttcttcttactgtccaaagagatgttcaacccctactacggcctctttgagtactctgccacggacaactacacccttcagatcaaccctaattcaggcctctgtaatgaggatcatttgtcctacttcacttttattggaagagttgctggtctggccgtatttcatgggaagctcttagatggtttcttcattagaccattttacaagatgatgttgggaaagcagataaccctgaatgacatggaatctgtggatagtgaatattacaactctttgaaatggatcctggagaatgaccctactgagctggacctcatgttctgcatagacgaagaaaactttggacagacatatcaagtggatttgaagcccaatgggtcagaaataatggtcacaaatgaaaacaaaagggaatatatcgacttagtcatccagtggagatttgtgaacagggtccagaagcagatgaacgccttcttggagggattcacagaactacttcctattgatttgattaaaatttttgatgaaaatgagctggagttgctcatgtgcggcctcggtgatgtggatgtgaatgactggagacagcattctatttacaagaacggctactgcccaaaccaccccgtcattcagtggttctggaaggctgtgctactcatggacgccgaaaagcgtatccggttactgcagtttgtcacagggacatcgcgagtacctatgaatggatttgccgaactttatggttccaatggtcctcagctgtttacaatagagcaatggggcagtcctgagaaactgcccagagctcacacatgctttaatcgccttgacttacctccatatgaaacctttgaagatttacgagagaaacttctcatggccgtggaaaatgctcaaggatttgaaggggtggattaagcaccctgtgcctcgggggtggttgttcttcaagcaagttctgcttgcacttttgcatttgcctaacagacttttgcagaggcgatggcagagagcagctgcaggcatggtccctggagccgagccttcaccacgcactcgtccaagttcggatgcgggaacctggtcccagcttgagttcctgcctttcccaccacaaattatcaactggttgatgtgtacactaattacatttcaggaggacttaatgctatttatgttgtgcctctgcaggcaaagcccttaataaatattttacatcctttctaatgacaatgaatggaattaatcactcaacaggtatagtattacgactcatgtttactttttaaaatgatttagaccgattttcagattttatttcgttatgattaaagatgtctcatgtacttggaaaagtgagcatttttttttttttttgtatttcactttcataccaggcttaatgtcaatgacatttttatttttgaagtactctgacacctccaccctctactttattagaattggaaggcaaatttttgtccaaaaacctacagacaagtactttgagagaatttccaatataatattagacataatgataattttttccatactcagaatgaaaaactggatattacgtttttgttttggggtttttttgtacaaatttagctaatagctacaggctgagagaattgtaacatagcatgacaaattttgtgttgacttgaaaggaatcacaccattattccttagaagtaattacatgtgttctaacacatttgagacagggttggactcccatttctcatccgagaaattacttaacccttcctggcgctgtacagtcatcttttattctatttcctctttgctgtttgtagtagagacattttgaatgaaacttggcactgcttgattcaaaactgtggaaaccagatctgtttagtctcctgtttgtatgcgtttgctaatggtagctaaataaccagtttttgttgtaaatgcaccaattctgaaggcactttatgtactacatggaggtcatatctggttttgtttttatttttttatcatgaacattaaatgtgatgatgatttcttttccctgcacacatctttccggtgcaatatctatcaattgtgaatctggctgctggtgtataaaaacctggatgtaaagctgagcctacagacctgtcctcaccaactgttttgtgatttctactcaactacaaagatttatttaatgtactcttaatctaactgagttttgttaccaatgacctgttgcatgcttcaataccgtgtactgcctgagttgtgcctcttgtgtgctagattaaaagtgagacagagacttgacttgatcctctgagctcaagctattgagctggtagtggcagaggactgagggtacctgcacagtttgattcttttccacgtgtaagtctccattgcagaattgtcgtgctttgagaaaacacctgaggcagtgtgggagttgaacgaccctgctgtcctttttaacctgtgttgtcctagaccctgtcggggcagtcaggggacactagagatttgatctcatgcgagtcatcaataggacaaaaaagttgtggtttggggaggtctgtttgttacataaaaaggacctttcggtgtaagaaattgccgtttttaccctgccctggctggcatgtgagaagccatggaaggttgtggttgtaaatgagttgtctaaaggggtgcagaggcctgaggtttctaaaagaaggtagatttctacagagctgagtgttggttcctttttcttattggttgaaaattacctggtagtgatcagaaaacttagatgctatgtaactaaaaaaaaaaaaaaaaaaaaaaaaaaaaaaaaaaaaattcccgctcatgagttttgactattggtgagatgttttccgctacagttaacatgacaaatgtctcagtggcaaaaatcccctttttgtaagcccccatagtctagaggcagttttctttttaagaatcatgccagagcctgagtcgagcagtatgctttcttggtttttgagagtaattgtgtaattgtagagggagaaatccaattctaacctaagaactgggattcttctgtcatcttgtaaaccgtatattgaaaaaaacagaatgtcactaaatgcatattaagtcaagtattggaaagtataaaagaaaaatcattctgacaatttctaagccagaagcaaacaagaattactgaaatctaccccatgaatacttggaaggcagtaattgtgagtgacacctcagttcatcaaccccttaataatatcagcttaattttaatgacaactaaatatgctgaagtgaggatttagtattttttaaaaaagcaaaacaaggttcagtagtcctcagcaattctccaagtttctctctttgcctaaaatggtcatagatcttgatttctctgaatcgtgatgaccacacccagtcatcttcacagcataattgcaggtggcagtaaagagagtgtgctgggtaaggagcagttgctgggtcattccttgggccccgacctgcccggggagtagccctgggggagagagggcagtgttgcctatcccagaggtcccagcagtcacactgctctgcaggccgggctctctttatagccagagaaatcaccttaatgcagtctctttagttgtctgctgaagctgtagttattatgggccacttacatgaggctgagaagtacgtgccggagctcacacactgcctgttgcggttctcttaacatcagttatcacagctgcctgtgggtcccgggtatttccattcctgccccttgttggcccgaggaaggatgtggaaagagcacctggtgggatgaaggtccaacagcctgtgcctctccactgctggccctggagccggcagcagtgaggcattcattgtctgtgttgcggtgtattcccagcttcagtgctcttttcctttttgcctgaaatgtttatgcttctctgcagccagtcctctaacaaatctcaagaacaaaggtaagacacttggtttttgtttccaggacccttcagaaggtgacatcagatattccctaaattcagacaatgagggatacagagcgacttggcatgtattatttctcccatgtaaggacaaagggacagattattattgttatttctgagacagagtcttgctctgtagctcaggctggagtgcagtggctcaatctcagctcaccacaacctctgcctcctggcttcaagcgattcttctgcctcagcctccccgaatagttgggattacaggcacccaccaccacgcctggctaatttttgtatttttagtagagatggtttcaccatgctggccaggctggtcttgaactcctgacctcaggtgatcctcccgcctcagccttccaaagtgctgggattacaagcatgagccaccgcacccggcctcacagtgacagattctgagaaacagcatgcaaaacatttgaaccattttctacatctcccattgttgcatagagagtgtgcaccgctgctatcttgccagatccacactggtcctcccgaaagccaggttcatacacagcaactttttaattattctaacagttacccattaacagtcgactcctgtatttctgagagtcttgtactcacctctgaaatttaaaaacgtataaagagagcctgggttaatcagttctgcagcccctacgtgacactgtgctagttctccttcttctgtctcctccttaccctggccctgcacccctgtacttaagagggagaggtgggaggtgctgtctggtatcatttgctgcctcgccagtagagggtgccgctgtgcagggtaactgcccgcctgctcccttcctgacctcccctgaccccgaagatcactacctctgtcattcaggcattggggtacatcctgataagtcgtgtcagaactgccaatttcaggactgagatgtgtttttaaaaaacaaatccttataaactccactttgtactttagattttaaaactggggaaaaatgtgatattctttggaccacttttttaatttatataagccttaatgaacagtgtctatacatttgcatacacacacccccaccccagagtgttctcagtatgtcagagaaagtgccacagcattaggacgggagcttggagaacgttttctagaaaagggttagcttcctgttggcatgaaattttccaagcaaacctcattaaacatctgttgtttgttaaagatgttccactgaaagcaacgcatgtttcaaaggcacgtctttccgttcgttggttttctgtgtgtaaggagtagcattgctgttggcgcctaacctcgcgtgcactgcattctcaaccccgtaccagtgcatcatcagaagccttcctcgtgaccataactctgtgtctgcagatatgtgttcccgtgtaagccagttttccccttttactcagactgatttcacctagattgtcacggtttccttcatgttaactttgcgtgactttgttcttcctttactactctgtatgtaatatatatacatatatacgtacatatgctgtccaaatatatttgtatatatttgtatagcatttttacacctttattgagtaatctggtttcgaaaggaggtgagagtttagtcccttctgcagttttctccaagctgtgtcctgtgaatttcaacccttggagcctaagaaaaccctaggaagatgatgttaatttgctgtcatttcctaattcaggatctatcatcaaatgaaacatgaaaaaaacagtgacttttaaggtgaaaagagtttcaagcattccaaataaattatcaatgtttcataactttttattataaacccacctcctaataggaagccaagtactatttgatacagtggtaaaaaccaaactaccttgaatttttttaaggcaacttatgaataatgctcattttcacagtcagaatagctttaaaatatggttgaatttgatacacacaggaagttttcttgaagaacaatcctttcgcttttcttttttcttgagagatctaaagagaaactgtagattgttttcctgacagcaaaagactaatgtgacaaaatgaagtcattgtaaagaagcgatgcaacttgtcaaatatttaataaagaattatggaagctggaacattttctacatca

SEQ ID NO: 106 - protein, 933 aa, Homo sapiens
HSGESRILRVKVVSGIDLAKKDIFGASDPYVKLSLYVADENRELALVQTKTIKKTLNPKWNEEFYFRVNPSNHRLLFEVFDENRLTRDDFLGQVDVPLSHLPTEDPTMERPYTFKDFLLRPRSHKSRVKGFLRLKMAYMPKNGGQDEENSDQRDDMEHGWEVVDSNDSASQHQEELPPPPLPPGWEEKVDNLGRTYYVNHNNRTTQWHRPSLMDVSSESDNNIRQINQEAAHRRFRSRRHEDLEPEPSEGGDVPEPWETISEEVNIAGDSLGLALPPPPDGSRTSPQELSEELSRRLQITPDSNGEQFSSLIQREPSSRLRSCSVTDAVAEQGHLPPPSVAYVHTTPGLPSGWEERKDAKGRTYYVNHNNRTTTWWIMQLAEDGASGSATNSNNHLIEPQIRRPRSLSSPTVTLSAPLEGAKDSPVRRAVKDTLSNPQSPQPSPYNSPKPQHKVTQSFLPPGWEMRIAPNGRPFFIDHNTKTTTWEDPRLKFPVHMRSKTSLNPNDLGPLPPGWEERIHLDGRTFYIDHNSKITQWEDPRLQNPAITGPAVPYSREFKQKYDYFRKKLKKPADIPNRFEMKLHRNNIFEESYRRIMSVKRPDVLKARLWIEFESEKGLDYGGVAREWFFLLSKEMFNPYYGLFEYSATDNYTLQINPNSGLCNEDHLSYFTFIGRVAGLAVFHGKLLDGFFIRPFYKMMLGKQITLNDMESVDSEYYNSLKWINDPTELDLMFCIDEENFGQTYQVDLKPNGSEIMVTNENKREYIDLVIQWRFVNRVQKQMNAFLEGFTELLPIDLIKIFDENELELLMCGLGDVDVNDWRQHSIYKNGYCPNHPVIQWFWKAVLLMDAEKRIRLLQFVTGTSRVPMNGFAELYGSNGPQLFTIEQWGSPEKLPRAHTCFNRLDLPPYETFEDLREKLLMAVENAQGFEGVD

SEQ ID NO: 107 - DNA, 8300 bp, Homo sapiens
ttccaacccagacaggcttaagccgcgcgagggtgcccgggtgggtggctgcgcagggccctacctgggcgggagcggctgcagagccctgtccacgcggtgcctccccagcacggcacctcccactccaggctgttggttacctggccgggagctggcggagaccaggatttctcctcgccgccgttgctgttgttaggggaaacagaccatctgcatctagacctgcctctctctccgctccccacttcagacgagctcttcctgcctggaatctgtgatccgtatgtgaaactttcattgtacgtagcggatgagaatagagaacttgctttggtccagacaaaaacaattaaaaagacactgaacccaaaatggaatgaagaattttatttcagggtaaacccatctaatcacagactcctatttgaagtatttgacgaaaatagactgacacgagacgacttcctgggccaggtggacgtgccccttagtcaccttccgacagaagatccaaccatggagcgaccctatacatttaaggactttctcctcagaccaagaagtcataagtctcgagttaagggatttttgcgattgaaaatggcctatatgccaaaaaatggaggtcaagatgaagaaaacagtgaccagagggatgacatggagcatggatgggaagttgttgactcaaatgactcggcttctcagcaccaagaggaacttcctcctcctcctctgcctcccgggtgggaagaaaaagtggacaatttaggccgaacttactatgtcaaccacaacaaccggaccactcagtggcacagaccaagcctgatggacgtgtcctcggagtcggacaataacatcagacagatcaaccaggaggcagcacaccggcgcttccgctcccgcaggcacatcagcgaagacttggagcccgagccctcggagggcggggatgtccccgagccttgggagaccatttcagaggaagtgaatatcgctggagactctctcggtctggctctgcccccaccaccggcctccccaggatctcggaccagccctcaggagctgtcagaggaactaagcagaaggcttcagatcactccagactccaatggggaacagttcagctctttgattcaaagagaaccctcctcaaggttgaggtcatgcagtgtcaccgacgcagttgcagaacagggccatctaccaccgccatcagtggcctatgtacataccacgccgggtctgccttcaggctgggaagaaagaaaagatgctaaggggcgcacatactatgtcaatcataacaatcgaaccacaacttggactcgacctatcatgcagcttgcagaagatggtgcgtccggatcagccacaaacagtaacaaccatctaatcgagcctcagatccgccggcctcgtagcctcagctcgccaacagtaactttatctgccccgctggagggtgccaaggactcacccgtacgtcgggctgtgaaagacaccctttccaacccacagtccccacagccatcaccttacaactcccccaaaccacaacacaaagtcacacagagcttcttgccacccggctgggaaatgaggatagcgccaaacggccggcccttcttcattgatcataacacaaagactacaacctgggaagatccacgtttgaaatttccagtacatatgcggtcaaagacatctttaaaccccaatgaccttggcccccttcctcctggctgggaagaaagaattcacttggatggccgaacgttttatattgatcataatagcaaaattactcagtgggaagacccaagactgcagaacccagctattactggtccggctgtcccttactccagagaatttaagcagaaatatgactacttcaggaagaaattaaagaaacctgctgatatccccaataggtttgaaatgaaacttcacagaaataacatatttgaagagtcctatcggagaattatgtccgtgaaaagaccagatgtcctaaaagctagactgtggattgagtttgaatcagagaaaggtcttgactatgggggtgtggccagagaatggttcttcttactgtccaaagagatgttcaacccctactacggcctctttgagtactctgccacggacaactacacccttcagatcaaccctaattcaggcctctgtaatgaggatcatttgtcctacttcacttttattggaagagttgctggtctggccgtatttcatgggaagctcttagatggtttcttcattagaccattttacaagatgatgttgggaaagcagataaccctgaatgacatggaatctgtggatagtgaatattacaactctttgaaatggatcctggagaatgaccctactgagctggacctcatgttctgcatagacgaagaaaactttggacagacatatcaagtggatttgaagcccaatgggtcagaaataatggtcacaaatgaaaacaaaagggaatatatcgacttagtcatccagtggagatttgtgaacagggtccagaagcagatgaacgccttcttggagggattcacagaactacttcctattgatttgattaaaatttttgatgaaaatgagctggagttgctcatgtgcggcctcggtgatgtggatgtgaatgactggagacagcattctatttacaagaacggctactgcccaaaccaccccgtcattcagtggttctggaaggctgtgctactcatggacgccgaaaagcgtatccggttactgcagtttgtcacagggacatcgcgagtacctatgaatggatttgccgaactttatggttccaatggtcctcagctgtttacaatagagcaatggggcagtcctgagaaactgcccagagctcacacatgctttaatcgccttgacttacctccatatgaaacctttgaagatttacgagagaaacttctcatggccgtggaaaatgctcaaggatttgaaggggtggattaagcaccctgtgcctcgggggtggttgttcttcaagcaagttctgcttgcacttttgcatttgcctaacagacttttgcagaggcgatggcagagagcagctgcaggcatggtccctggagccgagccttcaccacgcactcgtccaagttcggatgcgggaacctggtcccagcttgagttcctgcctttcccaccacaaattatcaactggttgatgtgtacactaattacatttcaggaggacttaatgctatttatgttgtgcctctgcaggcaaagcccttaataaatattttacatcctttctaatgacaatgaatggaattaatcactcaacaggtatagtattacgactcatgtttactttttaaaatgatttagaccgattttcagattttatttcgttatgattaaagatgtctcatgtacttggaaaagtgagcatttttttttttttttgtatttcactttcataccaggcttaatgtcaatgacatttttatttttgaagtactctgacacctccaccctctactttattagaattggaaggcaaatttttgtccaaaaacctacagacaagtactttgagagaatttccaatataatattagacataatgataattttttccatactcagaatgaaaaactggatattacgtttttgttttggggtttttttgtacaaatttagctaatagctacaggctgagagaattgtaacatagcatgacaaattttgtgttgacttgaaaggaatcacaccattattccttagaagtaattacatgtgttctaacacatttgagacagggttggactcccatttctcatccgagaaattacttaacccttcctggcgctgtacagtcatcttttattctatttcctctttgctgtttgtagtagagacattttgaatgaaacttggcactgcttgattcaaaactgtggaaaccagatctgtttagtctcctgtttgtatgcgtttgctaatggtagctaaataaccagtttttgttgtaaatgcaccaattctgaaggcactttatgtactacatggaggtcatatctggttttgtttttatttttttatcatgaacattaaatgtgatgatgatttcttttccctgcacacatctttccggtgcaatatctatcaattgtgaatctggctgctggtgtataaaaacctggatgtaaagctgagcctacagacctgtcctcaccaactgttttgtgatttctactcaactacaaagatttatttaatgtactcttaatctaactgagttttgttaccaatgacctgttgcatgcttcaataccgtgtactgcctgagttgtgcctcttgtgtgctagattaaaagtgagacagagacttgacttgatcctctgagctcaagctattgagctggtagtggcagaggactgagggtacctgcacagtttgattcttttccacgtgtaagtctccattgcagaattgtcgtgctttgagaaaacacctgaggcagtgtgggagttgaacgaccctgctgtcctttttaacctgtgttgtcctagaccctgtcggggcagtcaggggacactagagatttgatctcatgcgagtcatcaataggacaaaaaagttgtggtttggggaggtctgtttgttacataaaaaggacctttcggtgtaagaaattgccgtttttaccctgccctggctggcatgtgagaagccatggaaggttgtggttgtaaatgagttgtctaaaggggtgcagaggcctgaggtttctaaaagaaggtagatttctacagagctgagtgttggttcctttttcttattggttgaaaattacctggtagtgatcagaaaacttagatgctatgtaactaaaaaaaaaaaaaaaaaaaaaaaaaaaaaaaaaaaaattcccgctcatgagttttgactattggtgagatgttttccgctacagttaacatgacaaatgtctcagtggcaaaaatcccctttttgtaagcccccatagtctagaggcagttttctttttaagaatcatgccagagcctgagtcgagcagtatgctttcttggtttttgagagtaattgtgtaattgtagagggagaaatccaattctaacctaagaactgggattcttctgtcatcttgtaaaccgtatattgaaaaaaacagaatgtcactaaatgcatattaagtcaagtattggaaagtataaaagaaaaatcattctgacaatttctaagccagaagcaaacaagaattactgaaatctaccccatgaatacttggaaggcagtaattgtgagtgacacctcagttcatcaaccccttaataatatcagcttaattttaatgacaactaaatatgctgaagtgaggatttagtattttttaaaaaagcaaaacaaggttcagtagtcctcagcaattctccaagtttctctctttgcctaaaatggtcatagatcttgatttctctgaatcgtgatgaccacacccagtcatcttcacagcataattgcaggtggcagtaaagagagtgtgctgggtaaggagcagttgctgggtcattccttgggccccgacctgcccggggagtagccctgggggagagagggcagtgttgcctatcccagaggtcccagcagtcacactgctctgcaggccgggctctctttatagccagagaaatcaccttaatgcagtctctttagttgtctgctgaagctgtagttattatgggccacttacatgaggctgagaagtacgtgccggagctcacacactgcctgttgcggttctcttaacatcagttatcacagctgcctgtgggtcccgggtatttccattcctgccccttgttggcccgaggaaggatgtggaaagagcacctggtgggatgaaggtccaacagcctgtgcctctccactgctggccctggagccggcagcagtgaggcattcattgtctgtgttgcggtgtattcccagcttcagtgctcttttcctttttgcctgaaatgtttatgcttctctgcagccagtcctctaacaaatctcaagaacaaaggtaagacacttggtttttgtttccaggacccttcagaaggtgacatcagatattccctaaattcagacaatgagggatacagagcgacttggcatgtattatttctcccatgtaaggacaaagggacagattattattgttatttctgagacagagtcttgctctgtagctcaggctggagtgcagtggctcaatctcagctcaccacaacctctgcctcctggcttcaagcgattcttctgcctcagcctccccgaatagttgggattacaggcacccaccaccacgcctggctaatttttgtatttttagtagagatggtttcaccatgctggccaggctggtcttgaactcctgacctcaggtgatcctcccgcctcagccttccaaagtgctgggattacaagcatgagccaccgcacccggcctcacagtgacagattctgagaaacagcatgcaaaacatttgaaccattttctacatctcccattgttgcatagagagtgtgcaccgctgctatcttgccagatccacactggtcctcccgaaagccaggttcatacacagcaactttttaattattctaacagttacccattaacagtcgactcctgtatttctgagagtcttgtactcacctctgaaatttaaaaacgtataaagagagcctgggttaatcagttctgcagcccctacgtgacactgtgctagttctccttcttctgtctcctccttaccctggccctgcacccctgtacttaagagggagaggtgggaggtgctgtctggtatcatttgctgcctcgccagtagagggtgccgctgtgcagggtaactgcccgcctgctcccttcctgacctcccctgaccccgaagatcactacctctgtcattcaggcattggggtacatcctgataagtcgtgtcagaactgccaatttcaggactgagatgtgtttttaaaaaacaaatccttataaactccactttgtactttagattttaaaactggggaaaaatgtgatattctttggaccacttttttaatttatataagccttaatgaacagtgtctatacatttgcatacacacacccccaccccagagtgttctcagtatgtcagagaaagtgccacagcattaggacgggagcttggagaacgttttctagaaaagggttagcttcctgttggcatgaaattttccaagcaaacctcattaaacatctgttgtttgttaaagatgttccactgaaagcaacgcatgtttcaaaggcacgtctttccgttcgttggttttctgtgtgtaaggagtagcattgctgttggcgcctaacctcgcgtgcactgcattctcaaccccgtaccagtgcatcatcagaagccttcctcgtgaccataactctgtgtctgcagatatgtgttcccgtgtaagccagttttccccttttactcagactgatttcacctagattgtcacggtttccttcatgttaactttgcgtgactttgttcttcctttactactctgtatgtaatatatatacatatatacgtacatatgctgtccaaatatatttgtatatatttgtatagcatttttacacctttattgagtaatctggtttcgaaaggaggtgagagtttagtcccttctgcagttttctccaagctgtgtcctgtgaatttcaacccttggagcctaagaaaaccctaggaagatgatgttaatttgctgtcatttcctaattcaggatctatcatcaaatgaaacatgaaaaaaacagtgacttttaaggtgaaaagagtttcaagcattccaaataaattatcaatgtttcataactttttattataaacccacctcctaataggaagccaagtactatttgatacagtggtaaaaaccaaactaccttgaatttttttaaggcaacttatgaataatgctcattttcacagtcagaatagctttaaaatatggttgaatttgatacacacaggaagttttcttgaagaacaatcctttcgcttttcttttttcttgagagatctaaagagaaactgtagattgttttcctgacagcaaaagactaatgtgacaaaatgaagtcattgtaaagaagcgatgcaacttgtcaaatatttaataaagaattatggaagctggaacattttctacatca

SEQ ID NO: 108 - protein, 990 aa, Homo sapiens
ARCPGGWLRRALPGRERLQSPVHAVPPQHGTSHSRLLVTWPGAGGDQDFSSPPLLLLGETDHLHLDLPLSPLPTSDELFLPGICDPYVKLSLYVADENRELALVQTKTIKKTLNPKWNEEFYFRVNPSNHRLLFEVFDENRLTRDDFLGQVDVPLSHLPTEDPTMERPYTFKDFLLRPRSHKSRVKGFLRLKMAYMPKNGGQDEENSDQRDDMEHGWEVVDSNDSASQHQEELPPPPLPPGWEEKVDNLGRTYYVNHNNRTTQWHRPSLMDVSSESDNNIRQINQEAAHRRFRSRRHEDLEPEPSEGGDVPEPWETISEEVNIAGDSLGLALPPPPDGSRTSPQELSEELSRRLQITPDSNGEQFSSLIQREPSSRLRSCSVTDAVAEQGHLPPPSVAYVHTTPGLPSGWEERKDAKGRTYYVNHNNRTTTWWIMQLAEDGASGSATNSNNHLIEPQIRRPRSLSSPTVTLSAPLEGAKDSPVRRAVKDTLSNPQSPQPSPYNSPKPQHKVTQSFLPPGWEMRIAPNGRPFFIDHNTKTTTWEDPRLKFPVHMRSKTSLNPNDLGPLPPGWEERIHLDGRTFYIDHNSKITQWEDPRLQNPAITGPAVPYSREFKQKYDYFRKKLKKPADIPNRFEMKLHRNNIFEESYRRIMSVKRPDVLKARLWIEFESEKGLDYGGVAREWFFLLSKEMFNPYYGLFEYSATDNYTLQINPNSGLCNEDHLSYFTFIGRVAGLAVFHGKLLDGFFIRPFYKMMLGKQITLNDMESVDSEYYNSLKWINDPTELDLMFCIDEENFGQTYQVDLKPNGSEIMVTNENKREYIDLVIQWRFVNRVQKQMNAFLEGFTELLPIDLIKIFDENELELLMCGLGDVDVNDWRQHSIYKNGYCPNHPVIQWFWKAVLLMDAEKRIRLLQFVTGTSRVPMNGFAELYGSNGPQLFTIEQWGSPEKLPRAHTCFNRLDLPPYETFEDLREKLLMAVENAQGFEGVD

SEQ ID NO: 109 - DNA, 8064 bp, Homo sapiens
cagtcacagaggaagccatttccagagaggaacaaccgtgtagactgctttcctgggagtcaagttaaaacttctctcctgtgaccttgtcacccggcagtggaaagttacccttggctgcagccacgacttccgcatactcttcagaacttgctctgcccttgagttttccagctttcctttaatgcactaaacctttaatattgtattctcctaaatgagacgtctcgcatttgagcaggtaacactcgggagagtcccgtattctcagagtaaaagttgtttctggaattgatctcgccaaaaaggacatctttggagccaggcggatgagaatagagaacttgctttggtccagacaaaaacaattaaaaagacactgaacccaaaatggaatgaagaattttatttcagggtaaacccatctaatcacagactcctatttgaagtatttgacgaaaatagactgacacgagacgacttcctgggccaggtggacgtgccccttagtcaccttccgacagaagatccaaccatggagcgaccctatacatttaaggactttctcctcagaccaagaagtcataagtctcgagttaagggatttttgcgattgaaaatggcctatatgccaaaaaatggaggtcaagatgaagaaaacagtgaccagagggatgacatggagcatggatgggaagttgttgactcaaatgactcggcttctcagcaccaagaggaacttcctcctcctcctctgcctcccgggtgggaagaaaaagtggacaatttaggccgaacttactatgtcaaccacaacaaccggaccactcagtggcacagaccaagcctgatggacgtgtcctcggagtcggacaataacatcagacagatcaaccaggaggcagcacaccggcgcttccgctcccgcaggcacatcagcgaagacttggagcccgagccctcggagggcggggatgtccccgagccttgggagaccatttcagaggaagtgaatatcgctggagactctctcggtctggctctgcccccaccaccggcctccccaggatctcggaccagccctcaggagctgtcagaggaactaagcagaaggcttcagatcactccagactccaatggggaacagttcagctctttgattcaaagagaaccctcctcaaggttgaggtcatgcagtgtcaccgacgcagttgcagaacagggccatctaccaccgggtgccaaggactcacccgtacgtcgggctgtgaaagacaccctttccaacccacagtccccacagccatcaccttacaactcccccaaaccacaacacaaagtcacacagagcttcttgccacccggctgggaaatgaggatagcgccaaacggccggcccttcttcattgatcataacacaaagactacaacctgggaagatccacgtttgaaatttccagtacatatgcggtcaaagacatctttaaaccccaatgaccttggcccccttcctcctggctgggaagaaagaattcacttggatggccgaacgttttatattgatcataatagcaaaattactcagtgggaagacccaagactgcagaacccagctattactggtccggctgtcccttactccagagaatttaagcagaaatatgactacttcaggaagaaattaaagaaacctgctgatatccccaataggtttgaaatgaaacttcacagaaataacatatttgaagagtcctatcggagaattatgtccgtgaaaagaccagatgtcctaaaagctagactgtggattgagtttgaatcagagaaaggtcttgactatgggggtgtggccagagaatggttcttcttactgtccaaagagatgttcaacccctactacggcctctttgagtactctgccacggacaactacacccttcagatcaaccctaattcaggcctctgtaatgaggatcatttgtcctacttcacttttattggaagagttgctggtctggccgtatttcatgggaagctcttagatggtttcttcattagaccattttacaagatgatgttgggaaagcagataaccctgaatgacatggaatctgtggatagtgaatattacaactctttgaaatggatcctggagaatgaccctactgagctggacctcatgttctgcatagacgaagaaaactttggacagacatatcaagtggatttgaagcccaatgggtcagaaataatggtcacaaatgaaaacaaaagggaatatatcgacttagtcatccagtggagatttgtgaacagggtccagaagcagatgaacgccttcttggagggattcacagaactacttcctattgatttgattaaaatttttgatgaaaatgagctggagttgctcatgtgcggcctcggtgatgtggatgtgaatgactggagacagcattctatttacaagaacggctactgcccaaaccaccccgtcattcagtggttctggaaggctgtgctactcatggacgccgaaaagcgtatccggttactgcagtttgtcacagggacatcgcgagtacctatgaatggatttgccgaactttatggttccaatggtcctcagctgtttacaatagagcaatggggcagtcctgagaaactgcccagagctcacacatgctttaatcgccttgacttacctccatatgaaacctttgaagatttacgagagaaacttctcatggccgtggaaaatgctcaaggatttgaaggggtggattaagcaccctgtgcctcgggggtggttgttcttcaagcaagttctgcttgcacttttgcatttgcctaacagacttttgcagaggcgatggcagagagcagctgcaggcatggtccctggagccgagccttcaccacgcactcgtccaagttcggatgcgggaacctggtcccagcttgagttcctgcctttcccaccacaaattatcaactggttgatgtgtacactaattacatttcaggaggacttaatgctatttatgttgtgcctctgcaggcaaagcccttaataaatattttacatcctttctaatgacaatgaatggaattaatcactcaacaggtatagtattacgactcatgtttactttttaaaatgatttagaccgattttcagattttatttcgttatgattaaagatgtctcatgtacttggaaaagtgagcatttttttttttttttgtatttcactttcataccaggcttaatgtcaatgacatttttatttttgaagtactctgacacctccaccctctactttattagaattggaaggcaaatttttgtccaaaaacctacagacaagtactttgagagaatttccaatataatattagacataatgataattttttccatactcagaatgaaaaactggatattacgtttttgttttggggtttttttgtacaaatttagctaatagctacaggctgagagaattgtaacatagcatgacaaattttgtgttgacttgaaaggaatcacaccattattccttagaagtaattacatgtgttctaacacatttgagacagggttggactcccatttctcatccgagaaattacttaacccttcctggcgctgtacagtcatcttttattctatttcctctttgctgtttgtagtagagacattttgaatgaaacttggcactgcttgattcaaaactgtggaaaccagatctgtttagtctcctgtttgtatgcgtttgctaatggtagctaaataaccagtttttgttgtaaatgcaccaattctgaaggcactttatgtactacatggaggtcatatctggttttgtttttatttttttatcatgaacattaaatgtgatgatgatttcttttccctgcacacatctttccggtgcaatatctatcaattgtgaatctggctgctggtgtataaaaacctggatgtaaagctgagcctacagacctgtcctcaccaactgttttgtgatttctactcaactacaaagatttatttaatgtactcttaatctaactgagttttgttaccaatgacctgttgcatgcttcaataccgtgtactgcctgagttgtgcctcttgtgtgctagattaaaagtgagacagagacttgacttgatcctctgagctcaagctattgagctggtagtggcagaggactgagggtacctgcacagtttgattcttttccacgtgtaagtctccattgcagaattgtcgtgctttgagaaaacacctgaggcagtgtgggagttgaacgaccctgctgtcctttttaacctgtgttgtcctagaccctgtcggggcagtcaggggacactagagatttgatctcatgcgagtcatcaataggacaaaaaagttgtggtttggggaggtctgtttgttacataaaaaggacctttcggtgtaagaaattgccgtttttaccctgccctggctggcatgtgagaagccatggaaggttgtggttgtaaatgagttgtctaaaggggtgcagaggcctgaggtttctaaaagaaggtagatttctacagagctgagtgttggttcctttttcttattggttgaaaattacctggtagtgatcagaaaacttagatgctatgtaactaaaaaaaaaaaaaaaaaaaaaaaaaaaaaaaaaaaaattcccgctcatgagttttgactattggtgagatgttttccgctacagttaacatgacaaatgtctcagtggcaaaaatcccctttttgtaagcccccatagtctagaggcagttttctttttaagaatcatgccagagcctgagtcgagcagtatgctttcttggtttttgagagtaattgtgtaattgtagagggagaaatccaattctaacctaagaactgggattcttctgtcatcttgtaaaccgtatattgaaaaaaacagaatgtcactaaatgcatattaagtcaagtattggaaagtataaaagaaaaatcattctgacaatttctaagccagaagcaaacaagaattactgaaatctaccccatgaatacttggaaggcagtaattgtgagtgacacctcagttcatcaaccccttaataatatcagcttaattttaatgacaactaaatatgctgaagtgaggatttagtattttttaaaaaagcaaaacaaggttcagtagtcctcagcaattctccaagtttctctctttgcctaaaatggtcatagatcttgatttctctgaatcgtgatgaccacacccagtcatcttcacagcataattgcaggtggcagtaaagagagtgtgctgggtaaggagcagttgctgggtcattccttgggccccgacctgcccggggagtagccctgggggagagagggcagtgttgcctatcccagaggtcccagcagtcacactgctctgcaggccgggctctctttatagccagagaaatcaccttaatgcagtctctttagttgtctgctgaagctgtagttattatgggccacttacatgaggctgagaagtacgtgccggagctcacacactgcctgttgcggttctcttaacatcagttatcacagctgcctgtgggtcccgggtatttccattcctgccccttgttggcccgaggaaggatgtggaaagagcacctggtgggatgaaggtccaacagcctgtgcctctccactgctggccctggagccggcagcagtgaggcattcattgtctgtgttgcggtgtattcccagcttcagtgctcttttcctttttgcctgaaatgtttatgcttctctgcagccagtcctctaacaaatctcaagaacaaaggtaagacacttggtttttgtttccaggacccttcagaaggtgacatcagatattccctaaattcagacaatgagggatacagagcgacttggcatgtattatttctcccatgtaaggacaaagggacagattattattgttatttctgagacagagtcttgctctgtagctcaggctggagtgcagtggctcaatctcagctcaccacaacctctgcctcctggcttcaagcgattcttctgcctcagcctccccgaatagttgggattacaggcacccaccaccacgcctggctaatttttgtatttttagtagagatggtttcaccatgctggccaggctggtcttgaactcctgacctcaggtgatcctcccgcctcagccttccaaagtgctgggattacaagcatgagccaccgcacccggcctcacagtgacagattctgagaaacagcatgcaaaacatttgaaccattttctacatctcccattgttgcatagagagtgtgcaccgctgctatcttgccagatccacactggtcctcccgaaagccaggttcatacacagcaactttttaattattctaacagttacccattaacagtcgactcctgtatttctgagagtcttgtactcacctctgaaatttaaaaacgtataaagagagcctgggttaatcagttctgcagcccctacgtgacactgtgctagttctccttcttctgtctcctccttaccctggccctgcacccctgtacttaagagggagaggtgggaggtgctgtctggtatcatttgctgcctcgccagtagagggtgccgctgtgcagggtaactgcccgcctgctcccttcctgacctcccctgaccccgaagatcactacctctgtcattcaggcattggggtacatcctgataagtcgtgtcagaactgccaatttcaggactgagatgtgtttttaaaaaacaaatccttataaactccactttgtactttagattttaaaactggggaaaaatgtgatattctttggaccacttttttaatttatataagccttaatgaacagtgtctatacatttgcatacacacacccccaccccagagtgttctcagtatgtcagagaaagtgccacagcattaggacgggagcttggagaacgttttctagaaaagggttagcttcctgttggcatgaaattttccaagcaaacctcattaaacatctgttgtttgttaaagatgttccactgaaagcaacgcatgtttcaaaggcacgtctttccgttcgttggttttctgtgtgtaaggagtagcattgctgttggcgcctaacctcgcgtgcactgcattctcaaccccgtaccagtgcatcatcagaagccttcctcgtgaccataactctgtgtctgcagatatgtgttcccgtgtaagccagttttccccttttactcagactgatttcacctagattgtcacggtttccttcatgttaactttgcgtgactttgttcttcctttactactctgtatgtaatatatatacatatatacgtacatatgctgtccaaatatatttgtatatatttgtatagcatttttacacctttattgagtaatctggtttcgaaaggaggtgagagtttagtcccttctgcagttttctccaagctgtgtcctgtgaatttcaacccttggagcctaagaaaaccctaggaagatgatgttaatttgctgtcatttcctaattcaggatctatcatcaaatgaaacatgaaaaaaacagtgacttttaaggtgaaaagagtttcaagcattccaaataaattatcaatgtttcataactttttattataaacccacctcctaataggaagccaagtactatttgatacagtggtaaaaaccaaactaccttgaatttttttaaggcaacttatgaataatgctcattttcacagtcagaatagctttaaaatatggttgaatttgatacacacaggaagttttcttgaagaacaatcctttcgcttttcttttttcttgagagatctaaagagaaactgtagattgttttcctgacagcaaaagactaatgtgacaaaatgaagtcattgtaaagaagcgatgcaacttgtcaaatatttaataaagaattatggaagctggaacattttctacatca

SEQ ID NO: 110 - protein, 824 aa, Homo sapiens
SRQKGHLWSQADENRELALVQTKTIKKTLNPKWNEEFYFRVNPSNHRLLFEVFDENRLTRDDFLGQVDVPLSHLPTEDPTMERPYTFKDFLLRPRSHKSRVKGFLRLKMAYMPKNGGQDEENSDQRDDMEHGWEVVDSNDSASQHQEELPPPPLPPGWEEKVDNLGRTYYVNHNNRTTQWHRPSLMDVSSESDNNIRQINQEAAHRRFRSRRHEDLEPEPSEGGDVPEPWETISEEVNIAGDSLGLALPPPPDGSRTSPQELSEELSRRLQITPDSNGEQFSSLIQREPSSRLRSCSVTDAVAEQGHLPPGAKDSPVRRAVKDTLSNPQSPQPSPYNSPKPQHKVTQSFLPPGWEMRIAPNGRPFFIDHNTKTTTWEDPRLKFPVHMRSKTSLNPNDLGPLPPGWEERIHLDGRTFYIDHNSKITQWEDPRLQNPAITGPAVPYSREFKQKYDYFRKKLKKPADIPNRFEMKLHRNNIFEESYRRIMSVKRPDVLKARLWIEFESEKGLDYGGVAREWFFLLSKEMFNPYYGLFEYSATDNYTLQINPNSGLCNEDHLSYFTFIGRVAGLAVFHGKLLDGFFIRPFYKMMLGKQITLNDMESVDSEYYNSLKWINDPTELDLMFCIDEENFGQTYQVDLKPNGSEIMVTNENKREYIDLVIQWRFVNRVQKQMNAFLEGFTELLPIDLIKIFDENELELLMCGLGDVDVNDWRQHSIYKNGYCPNHPVIQWFWKAVLLMDAEKRIRLLQFVTGTSRVPMNGFAELYGSNGPQLFTIEQWGSPEKLPRAHTCFNRLDLPPYETFEDLREKLLMAVENAQGFEGVD

SEQ ID NO: 111 - DNA, 254481 bp, Mus musculus
  misc_feature (1)...(254481): n = A,T,C or G
tagcggtattagtggaccctcctgggatttcaggcatggggcctacactggcttcccttgtatattctcttacagtatgtatctgcagatgtcttagttagggttttattgctgtgaagagatcacataaccaaggcaaggtcccttagaagggacaacatttcattggagctggcttacagtttcagaggttcagtccattatcttcaagacaggagcaggcagcatccagtcaggcatggtgcaggaggagctgagagttcttctacatattgatccacagacagtaggaggagactgtcttccactgcaaccaggaggaggctctgagtccatactgggtggagcttgagtataggagacctcaatgccctcctgcaccgacttactccctctgttccaacaaggccacacttcataatagtggctaagcattcaaacacatgaatttatggggccaaaccttttcaaaccaccacagcagacttgcattaatttttaaaagtatattctgaagaactccatcttggacactcttcaacatgtgtcaagacactcactcaggggctggagagatggctcagcttttatgagcactgactgctcttccagaggttctgagttcaattcccagcaaccacatggtggctcacaaccatctgtaatgggatcctaagcattcttctggtgtgtccgaagacagctgcagtgtactcacatacataaaaataaagcttacatagatacacagttctcattactgcatggaatgagctctgacagctcaggccagtgttcttcagtgttggagtttctggttcaacaacgtccatgcatctatgtttacactggaaatccttggccaagaaagtgactgtgcacttgttgctgccttggtttgaactttgcacccaacacgtaaatcctgtgcgcttttttcatcagtaaaagtgaattttggactaaacagtctctttcttctgtcgaactcttagcttttgagcttgagagatttgccacagtgtataatacgttttatggatgattttgacgtccagtttgttacgtccaataatttccttatagctaagaatttgagccagtagatatctgtccttgagaaagtaacaacctatagatagaaatatgtaaaatgaactggagagatggctctgtggttaagagtactagctgctcttctagagaaccggggctcaattcccagcacccacaaggcagcttacaatgatctatagtttcagttacagaggatcctatgtcgccttctgatcttctcaggtatgcacatgttggaaagatatatgtgcatgctacacatccatatataaaataaagcaatacattttaaaatttaaaaagagtgtgaaacatcctagtcatattggtgattccctcacttgaggttgcactttcttctacggtttgctttgtgaataaatggaatatttgtaactacgactatctcttagtcactgttcttttgctgtgatgaaacaccatgaccaaaagcaagttggggagggaaggctctattcagcttatgcctgcatatcagtatcagtattcatcaaaggaagtcaggtcaggaacccaaacagggcaggaacctggaggtaggagctgatgcagaggccatggagggtgctgctcactgccttgctcctcatggcttagtcagcctgctttcttagagaacccaggaccaccagcccaacaatgacatcacccacaatggcctagaccctcctccattgatcacaaattaagaaaatgtcctacaggcctgcctaagaccccatcttatggaggcattttcttgattgaggctccctcctctcagatgactgtagcttgtgtcaaggtgacgtatggctacccagcacagactaagggtagcatttcacttatcgcttattttcagaattagacgtgaaattgtctgtaagagtgatcagtcagcaatttcagtgtgacattttataaatggtatgatatgctcagtattaactatttaaatgcctttcttgtctcttgcagttgaaaacaaccctcgaacaggaaatcttgctgcgctaactaaggtcttcctatctagaaccagggagctcaggctctcagccgagtgtcagaagtaagttacggctcagcaccaccgcaccatgcttggcgccacggggaatcgtttttatttgatgcaggggataggctgtggtcttttgaaaacccctgtggagaaattatactctctcttttttttttttttttttttttttggtttttcgagacagggtttctctgtatagccctggctgtcctggaactcactctgtagaccaggctggccttgaactcagaaatccgcctgcctctgcctcccaagtgctgggactaaaggcgtgcaccaccacgcccggctatactctttattaagagaaaaaaaagtaagagaagtttttattttaggtcttaaattgttggtgtgagatgcagtgatttgtttgattccagcactttcgttagttattaaaattatattctttaaaatgattagtaattatataattatttttaatccagttttaaaattaatcaattcatttgttttgggtagcacataaaatgggttttatggtgacgtttgtttgctcatgttcatctgccctcctttgtcatgatgtcgttgttactgtaaaaggtgttccctcccgttacctctccttgtgattactaatctagtttaaatagcgacttagattgatatcatctatgccacatctatagctctatgtcctaaatactggatctgtggatgtctgattgtttatgactagagcattgactttgtagcccaggctggaccaggcactctggtgctttaagcttccaggtgctgggatatcaggtggggccgctgtgcctggcgcttataaaattgttatagctagatagtgtcatctgtaagattgtttattgctttgcttaggaagaactatctcaaatcgtcctgtcattaatacaaataacaggcacgatgttgtgttgccacagatgtcccctttggtgacattgtatacttgcatatgttctctttatgctaccatagttttagctttctttgccttcacgtgagacagttataaagctaaggacaaactggttacacctacaggtgccagtgaccgttttaatccagtagacttcactcagtagagttcgatctgagggaagatacagtagctgccactggctctgtgtaactgcaagatgcagacattgtcctatccacagcccgtgcagagccatcctcacattaggaagacacaatgactagaaacaaaccgcccttgcctacgatgaactactgaaggtgaggtgattctggtctttcctttccagccacatcttcatctggcagacacacaatgctctgtttattatttgctgcttgctgaaagtgttcatccgtgagctgtctgaggaagagctgcagcttcattttacatatgaagaaaagtcccccggcagctacagtaagtaataggtccatgcagaccttaggattaaagtaggatctggcctcgtggggaaggaagggtccccctcccagcagtcatctgtgacctccacgtgtgcaccgtggctcctgtgctgctcacacctgctcatcacacacacacacacacacacacctgctcatcacacacacacacacacctgctcatcacacacacacctgctcatcacacacacacacacacacactcannnnnnnnnnnnnnnnnnnnnnnnnnnnnnnnnnnnnnnnnnnnnnnnnnnnnnnnnnnnnnnnnnnnnnnnnnnnnnnnnnnnnnnnnnnnnnnnnnnnnnnnnnnnnnnnnnnnnnnnnnnnnnnnnnnnnnnnnnnnnnnnnnnnnnnnnnnnnnnnnnnnnnnnnnnnnnnnnnnnnnnnnnnnnnnnnnnnnnnnnnnnnnnnnnnnnnnnnnnnnnnnnnnnnnnnnnnnnnnnnnnnnnnnnnnnnnnnnnnnnnnnnnnnnnnnnnnnnnnnnnnnnnnnnnnnnnnnnnnnnnnnnnnnnnnnnnnnnnnnnnnnnnnnnnnnnnnnnnnnnnnnnnnnnnnnnnnnnnnnnnnnnnnnnnnnnnnnnnnnnnnnnnnnnnnnnnnnnnnnnnnnnnnnnnnnnnnnnnnnacacacacacacacacacacacacacacacacacacacactcacacacacacactcacacacactcgcgcacacacacacacacacacacacacacacacacacacacacacactcagcagttaagcatggactttgacaactccaggtggcctgcaacaccatctgtttcctttcttaaagcggccatcaggaaaaggccttcctcctctgccgtctctgtccatcacttgttttgttgctgtaaccaaacacctgacagaatgggaaagaacgggtttcttttgcccggcggagtttgagggtgcattgagtcatggtgggacgtggcgtcatggtggggcgtggtggcagcaggagtacgaggcagctgtcatcttgcatctgcagtaaggaagcccagagagtccattgctggtgctcggctgcttttgcctttgatttggttggtacctcagtccgagggatggtaccacccacttctaatgtggacgctgtgtcacgggcatgcccagaggtctgtctcctgggtgatttgagatttggtcatgttgacaacagtgtaagcatcacaaagtctattccttgtcatcccaacaaacagaccacttactacttattattgttgcatttttagatttatttactttatgtggatgactgttttgcctctgtgtatgtatgtgtaccatgtgtgtacttggtgcctgtgaagggcagaagaaggcatggaatgctctggaactggagttaagggtggttgtgagccatgatgtatgtccaggtcctctctgcaagggtaacaagtgttctttattagtattttatttcaattcactttacacaccaatcacagctcccccaccaatcccacctatacatattcatcctccccactgccccctcctcttctcctcataaaaggggactcccccctgaggtaccactctaccctgggatatctaatcctagcaggcctcccactgaggcctaccaggcattctagataagggagatccaatggcaggcaacagagtcagagatggccccctctccaattgttaggggacccacatgaagaccaagtgtcacatctgctacaaatgtgtaggggccctgcatccagctccttatgctccctggaagtgatcttaagcaccgagacatctctccagcgcctgtgtgtgtgtgtgtgtgtgtgtgtgtgtgtgagagagagagagagagagagagagagagagagagagagagagagagaggctgtgtgcacgatgccatggcatgcaggtgaaggtcagaggacagcatttaggagttcgtttctccttctactgtggggtctgggaacctaactcaggtcatcacgttttgtggcgagtgccattgcctgtaaaacaatctggcctctcctcacatataatatataaccttttagccacgagcttctacctcttacctccatagatgtaaagccatgtcatgatgtgaaactcatttgttccatcctcaagtttccatggtctttaatagtttcagcactgtctaccattccaagtttcttttgtttcttttgagactgaacaggggtgctgctcactggctgtttcccctgtcttgcttagcctgctttcttatagaacccaggaccaccagcccagggatggcaccacccacaaggggcagggccctttcccactgatcgtcattgagaaaatgccttatagcttggtgtcatggaggtgcttgctccactgagactctcttctctctgatgaccctaagtggacacacactcagcaagtgcacttagggatccttctgtcatgactgtaagagcccctggcacacggcggcgtcttttctgtgtgaacacggtaattgcagacatccagaagcattgatgtgcttgggaaggcgtaggtcacagatcctaagtattgcagggcattgacgtagagaagttttgtttttagaaaagaatgagtttgtttccttttctttttgtgattagtttataacagcattttagaatgctaattaagccaggtggtggtggcgaatgcctttaatcccagcacttgggaggcagaggcaggaggatttctgagttcgaggccagcctggtctacagtgtgagttccaggacagccagggctacacagggaaacccagtctcgggaaaaaccaaaaaaaaaaaaaaaaaaaaaaaaaaaaagaatgctaattaaaaatatttaatatgggctggagagatggctcagtggttaagagcactgactcctcttccaaaggtcctaagttcaaatcccagcaaccacatggtggctcgcaaccacccgtaaagcgatctgatgccctcttctggcatatctgaagacagctacagtgtacttatgtataataataaataaatcttaaaaaaaatttaatactttagagtaactccaatgaaaatgagcagaaacattgactccaccaagattttctgaatataggtgtataattgtctgtgtgtgcttcattgtggttctggctggccttgaatgcagtctgcctatgtacctgcctgcctgcctgcctgcctgcctgcctgcctgcctgcctgcctgccttccttccttcctgccttccttccttccttcctaccttccttcctttcacgtgctaggcttgctgctctgcaccaccatgtctacggcatgttctgttttgaagaaacaagtttgttctggctttcaggcaccggaaactgttttggaggtatgtgagtgcccttgatgaaggttttaacgtttgtcattggcgcagtatactttgggcagcattgagaacctggccctgtcctgagtgctgcggagctgcggctaagtctctctttttaccagtgcttttactttgtccttttaaagatttatttttattccctgtgtccggctgtcttgtctgcggtttatatgtgcactgtgtacatacacggtgctggagacggtgatggacagtgtgagcatccttgtggatgctggaaactgcacatgggtcctctgccagaacagccagagcctataactgcagaacggctctccagcctccagctatttattttaatgaatggggtgtgtgtgtgtgtatgaatgtgtatatgtatgtgtgtatatgtgtgagtgtgtgtgtgtgtttgtttcattactgctttgcttctggtgatcagtaagggtctctacttttttgatacataattattagcataaatgataaaaattatctaagccaagaaagtgagagagagagttaagttagctacttttaataacaagcagcaattggaggataaactccaagtggagggctgactgggtatgtaagagtgagtttgaatgcactaagtgtgcttaactgaactgagatcatgaagtaatgaacaagaatcgacgagagcccttcagggtcaggaggatgcagcaggtggtgtgcgtctgtcgccagcctgaagtgcgagggactccagttcaggactatcctaggctacacagtgagctcctttctcaacaaaacaaacgaggctgcatcagagaggcggactgcttagtcaagaagactcggagagtgcttgcttacagaagggtggctgagtctgggttttagcattgggctgccagtgcagtcatcaaagatgaaaatgagaaagaagtgtgttgtgttagagaggcagctcagtggtgagagcactggctgctcttccagaggacccaggtttgaatcccagcactcacatggcagtttaccactttgagggggtcaagctccctcttctgggatctctgtgctgcccgtataccattcatgcacatacaattaaaacgaggtaaccagagaagtgttagaagtattgcactcatttctgaaaacacggagtttgagataatggtcactcatcttggacacgccagtagacagctggtgggagtctgcagctgtggaactctgactgcccgcgtcttgtccaatctgtgaaccgactagagtctgccctgccgagtgtgtgcgtgagagacagtttgacagaaaacaggatggtgtgtgagaggctgaaaggcaatctttggatttaggaatcactagcatgtaagctgtgatggggaggggcgaatggagagaggtggggggaggggagggaaaggagaaaaaacacaccagcctatggcagagtgaatggaaggtgtgtgttctggaggagtgctggcaagagaacagagaatgccaggtagctgtgagactgtacatgacccgaggaaatcatttcatgagggagttgatgtcatgagtgtccagaacccaaaccagacgtcacaaggctatcctctggcttaagcagtttggagtcccttagctgggggctttgggacagaaatgcttgtgttgggatgacagatcacatcctgtccttgccacttacaattctctgaccaggaaagccttcttgtctttggcttttgtttgtaaggattcaaaattcattctggcatctgtggattgacaaggggctgtggggttcatcaggatcaagggcaaagttgtatgaatatttgggggagggatataggtctaaatatctttgcttcaggtggagcagctaaagcagctttttttttttttttttaaattgtatctttgactttatataaaattccatcaaaagaagcagtgggaggtatgagaagtttgaaagttactagcctgtaggagccttaaggttgttggtttgtttttatttttatttttttatgatttttgttggttctttgtgaatttcacattatgtaccccagttccactaattccccccttccctcatacctgccctcttcccttgcaacaccctccctcccctctgccccccagaaaaaaagctacagtgtgtctggaagctacagtgtgtctggaaacagtgttcccttctgtccacacttctttgcttgcacatgttcactgcaatgacccactgatcaggttccaggcctctggcttctgctactctatcaatactggaatctcactgggactcctcttggatgtcctgttgttgccctgtgtcatggaaatcttgtagttttggctctgtaggaccagccccttcatcctctctagcagttcattgatggggtagatgttggggtggaccaattcaaagccctggatctgggcctgagaggatctgagctgctctgcccttcagctctcgtgctctcacacccttggcctggttcactgtcaacccttgcaccagggccagctccacccttctgcccaggcgaggtgctggggctgctctcccgagtgttgcagcaggtgagggccagggcccgctttcttgctctaagattacaagtacatacttgtaatcttagaatttgggggaggcttgccagttgaggactacacagtgagacccaatcttgaaagcaaaaatagagccagtgaggtagttaagcaaatcatgcgtttttctaactctgaaacgcacgtaaaagtagaaggagaaaaccactccacggagttacctcctgcctctcacccgtgtgctgtggcgcgtacaccgatacaaaaggaaaactgtgtcaagttgttgttaaggctgtgctgggtgctggcttgctcaggatctagattttattcagaggttaaaatagtgttggaatatatgtactaataaatttttcttattagaaatgaaaacttaacatctaagtaatttcctcattgtctaccttgtcaaaacaaacctttgtgtgtcttactaggttctgactctgaagaccttctggaagagttgctctgcagcttggtacagttaatcactgatactccactcttgtaagttctgcctgagccgggcttgctctccattctgtaatgaaaatgagaattgactgtgctgaagaggggtgtgtgtgtgtgtgtgtgtttgatggggggtgtggggcaggcagtgttgggtgaattccttattcattctcttctccccttttttgttttctctttcctgacccctcccactctctctgtcgttttgagatagggtcttaccatataactctggttaccctagaatgccctatgtagaccaggctggccttgaacttacaggatccacctgtctctgcctcctgagtgctgggattagaggcatgtgccactatgcccagctccccatattttctgagacaggctcttttatggaaccttgacttctttgacgtggctatactgccaggccagcaagcctcaggatccgcactgtggttgcaggcctgcgccatcaaactcggatttgttgtgggtgctgaggatcctaattgaggatctactgagctatctgcccaagccctgtgttgaagagcttgtaggttctggtatagtgtgtaaggattgcacactcataccattctttctattctgcctggtgtctgtagactgtgtctacctgacttgcttgcttttctgttgctgtgacaaaacaccatgagcaaagcaacttaaagagaacagaacatttaatgggggtcgtagtttcagaggttggtagagttctgtggccatcctggcagggagcatggccatgggcaggcgggcaggggggcgggcaggcaggcatgatacttggagcaggaactgagagctcactttgagacaaccatgaggtcgagagagctatctggaagtggtgtgggcttttgaaacctcaaagctcgctcccagcaacacacctcctccaacaaagccacagctcccaatccttcccaaacagttccagaaagcggggacaaagcactcagatatgtttgaggcttggggcccatttttatttaaaccacactgccatcaaacaagaatttcttgttaagggagaatgactgagtccttcagtaatattaacatggtaggcagaggactacattagcttggtaagacgagatcctataggtctgtaaagagtttgagaaaggcaagttgaatctagtgtatgtggtagaaaaagcaaactgaccacagagtatactctttccccccagcttcttggttttgttttgagacttttagggaggacagagttctttccagtgttctttgaagctaggtgtgttccttgagatgtcattggggaggtcctccaatgagacttgtcagtgaagttcattactcaatgaagaagtgtgtggttctccttctgacagcctttttccttgtgtcccagaacatagatgaggtcttctgagttgcacacccatcctggcaccacgaccagtagtctcctagaggttttgctttgatgtcactgagccctgaaccaaggtcaacaagtgctgttctccttcccttaccctggacgtctcatgtgacaagccaaacccttagctgtttatgctgctggaaccgggtttccattgctacagctcagtgcagttcctctgtgtgtaaaattgtctactcactatgagccgttgcttatcacccctctcatcacagatcctcctctggaatcctaagccgtttctgtcatcattgctgtctttatacactggctgtgcactcatgtatcttggccctttggaaggccacgaacctttgtattgtctgtgacattcttccatcaccagacactttaattactttggagaatttacaaatggactgactcttgagaacagaacctttcgtgttggcctgctggtgccatgtcttgtcctccaccttcagctgtctgagtagctatgatgagaatacaactatcgccttacttattgggtgtgtgcgtgcatgcgcagagacagccatgtgtgggcatgtgtgtaccatagcacatgtatggaggtcagaggataaatgtgagagtaagttctttcctcctaccatgtaggtcctgaggactgagctccagttatcagacttggtagtaagcacctttacctgatctatttttctggttccagagatacacatttgaaaggaattacatttatatattagacagggtctcataaatcccaggctgcccgtgtagctgagaataactttgaactttataaaaagttgttttgtacatatcagtgttttgcctgcatgtatgtctctgtaccatgtatggtcattgcctgagaagaccaaaagaggatgttggatcccctggaactggagttgtagaagcttgtgagccaccaacgtgggtgctagatactaaacctgagttctctggaagaacatccagtgctcgtaactgctgccccgtcttcctagccccagccttgaacatttcctcctccccctcttatctctcgagtgtggagaccccaggtctgttccaccacatgcactttatggaggctgcacacaggcagctagacatgcactccaccagctgacctgcatctccagccgtgggaaggaagtagtttttagataaagaagttcttcaggtttatcatcataaagtaacaaacacagaggggttttgtcagaaatggcccagaaacaaaagacaagcctttgtgagcaaatacgcccttggggatactgtacacgaatccatcctttcctagagctggagagctgcaccatgccttgtcctgcgttgatgcacggtgagctgagctaagtagacagcctgctcggggaggacgtggggatagcgtcccaccaatgtctggtggtacacagaattgtttacccatctcccagtttttctcttgctttaagtagaatttgatactgcccagggtgaccgtgcaagcacagcttacagtctcctctttgtacccacatgtgtcacatggcttgcactgatgcagagagacttacgccaccaggtgtcacttcactgagcgcatgcatttcaagtcctttgttccttgccctgtcctttttcttacttaatatgggatataagacaatgctcagttcatactgaactacgggtaagagagtcacttgcaaagggtaggtcctaggagcatgggctgttagtaatattagtaagattatttgagtgctcattctcacctgcattcttttttttaagatttattttatttattatatgtaagcacactgtagctgtcttcagacatcaggagagggaatcaggtcttgttacagatggttgtgagccaccatgtggttgctgggatttgaactcaggacctccagaagagcagttagtgctcttaactgctgagccatcttgccagcccctcaactgtatttttatgtgagaaagccagttcttgtcttggttaagtcannnnnnnnnnnnnnnnnnnntgcaccagaagagggcatcagatctcattacagatggttgtgagccaccatgtggttgctgggatttgaacttcggaccttcggaagagcagtcgggtgctcttacccactgagccatctcaccagccccgccctgtcctttttcttacttggaatatgggatataagacaatgctcagatcatactgaactacgggtaagagagtcacttgcaaagggtaggtcctaggagcatgggctgttagtaatattagtaagattatttgagtgctcattctcacctgtattctttttttttaaggtttattttatttattatatgtaagcacactgtagctgtcttcagacatcaggagagggaatcaggtcttgttacagatggttgtgagccaccatgtggttgctgggatttgaactcaggacctccagaagagcagtcagtgctcttacccgctgagccatctcgccagcccctcagctgtattcttatgtgagaaaaccagttcttgtcttggttaagtcactgtggtcaggttttggctatatttttttttcagatgggtgtggagaacttatgtaattccctgctcttttctaatcatattaagctagatgttttgtatgcttttgaccaaattttaaaattacattgatataattttaaaattaagcaggtcagattacacatgcatctaaccctagctcttgggagactgaggcaagaaggtggtgagttagtggatagcctgggctacgtactgcgttccagaccagcctggactgcatagtgagattcagtctgaaataagcacaagattaggcttttaatggcatttgttttcattgccaagtaccaacaattgaatgtgtacagactttagcctttattgatcatgttttgttgaagttagggagttggaagtattaaatatgtttagataataaagaggtggttagtagagtgactggaccagctgtgtggaagagccaacagcgttggagtatatcacacattcagtgttttaatgtgtttatcctttttaaatgaactgaaagtgcacaggcagccagatgtcttgtgttatgtatgctcagctagaagcagctgctgaaacaatttcttatgatttaatgtccttggaaatccatcttacaagacggtttgtcttggttacagtttccatgtgaaagcaactactctgtgtttcttctaccccaactgctccgcagcattccagaccagcctgtaactgaaggtagaattagcatggagccggaagccctctcagctcctgtaatgagaacgtcagtctggctggaatgctttactgttgctcttgcttacctgtgttgaattagcaggagaatcattagaagtctaattttggtagtcatgtaatttcaaactaacctaaatctttctttcttatgagactatattaaatagtctattaaaattgagagcaaaatgattactaagaataacatacattatgtatgtatgtacccatatgtgtatgtgtgtctccgtcctcccacacagctcttgcttgacttaagctagcttgaacttgctgtgtggctaaggatgaccttaaacttctgcatctcttgcccccaacccagggtggtaggattacaggtgtatactgtaatgcctggttcctacaaacttttaaatgactctttattagaaacaggatcaggctaggcccaggtccagtcgctaatcccagttattcaagaggttctcgagtttaagacttacctaggggatccccactttgaggaagacaacagtatctgaacagggccctctcaagaccgactctgtccttgtggagtaaagggcatgttagatcgattactgcaagtctgggaggttaagactggaagcgctgtgttgtttgaaagacaggaatgttagaagactgagctcgggctgtgtttcagagtctggaccaggacacagctaggaagtctagggcttctccctcagttccactttggaggagttgaggaggtttgaaactgtctgaaccgtgacatcctttatatcaacgtgctttctgaaatataatagttataagtgcacattcattcagaccgtagtctttcagtagtgtgttgtgaaatatctgaatactgaagaggtttattctcccccagtcattctttgtgtttgagacagggtcttaacagtgtagccctggctggcctggaactgttgtgtagactaggctagtcctgaactcaagagaggctcacctgcttctgcctttcattgccgggcttgaaggcatgtgctaccatacttggcttgtacgtggtttccttagttgtcaatgagagcgaaggcccccagtgctcatggttgggggtggaagggcttttataactccaggataatgtctttcttcagccctccatgttgattcacagaggcttctccaaagccagctcagtggaaggcaagagctcgctacagcaaatcagctttaaattttcagtgctgcaaattaaagtctagcacagctttctggatgaattaggaagttaagacatcataagtaagcattgaactaaatgttgtagaattttcatacaccaagatagaattgtgtattaaaaggttacaataggcatttaaaaaaattttttttaaaagatttatttatgtattatatataagtacactgtagctgtcttcaggcaccccagaagagggcgtcagatctcatcatgggtgattgtgaggcaccgctgaacccaggaccttcagaagaacagtcagtgctcttaactgctgagccatctctccagctcgtggtcctgtgtgtgctgaggcttcttcactcagtggtagagtatatacttaataataagatgaccttgaatttaatccctggcacaaagtattacagctacacttctaatttcagttttaaaactagccatcactcctatgacagcatctgaaatatataataattctctccttttagaatatctctgttggctcaaatagctatttctaaattttcgtcttaatcgtttaaacttgtcagttgtttttattaaacttatgttccatgtacagtgctgccaggttcctgcccaggagtcagtcagaggagcatggcttttccttctgggttcattagctttgctgttagccaacaccaacactcatttcacgatggcttttgtccttgtccaagtgtccccctgtgccccagcatcgcagcacaaggtcacggcttctgtcatttattcacatgaagtgttaacttgctccagcagtagtctgttctaggacatttcagcccagatgctggaaagctcttaggatactgcggcagccaaagcagtgcttcagctcactaaagttgactttggtttagcaattgtgtaatgaaaataaattttccgaagattatacaaggacttcaaaacaagaaagatctgtcggctgaaaacactgttcatttttttaaaaaatcactccactgagcatggtagaattttggtttctctcaagtattggcctcttcggactcatttccctgatgacttggcgtttaagatagttcaattaatattttaaatttagttattatagaaattaacattacctcaagttctttttttttccttcttagcattatcaggagttaaagaaggaattgacatcagagctcacccactgcccgcccttaaaggaaaaccgagatgcatagattccgtgttgaagtgagcagagctaataaggagctgaggaagagagctagctttcctggttttgggtggagagttcttacaacatgctgtaacaggacacgggtgctgattgcgttcttcatatggcctcatttcctgtgtgctcggattctgataggctgaagctcagtgtggttggggtaacctggtcttgtataggtcgataccttgatgtgagcagagccttctccatgagagtgcatcggcaccaacctcccttgtctttccagccttcctctttgctttcataactgactcttggctttcagtttctttgtaccatggaaactttaatgtataggaacagttaggagcacagagtcacatttcacccaatttttgcaccagggttgaaaaattctacatattgttctgaatcttgctaagattttcagtctaaccgaggagtctctgtatcccagtgctattttcgttttcaaataaaaacaaataaatctaacacctactattcatcctatttttaaaggacacaactcagtggttttgtgtgtattccccatgattctgcagcaacagagaaaccacaagcattgtctgtcacatccccacttgtcccctctttctcctcatggcaaacagtcccctctttctcctcctgtgggttttgcctgtgctgggtccctctggactgacttttcccttctaattctgtatggtctgctcaccttcatgtattgtcatgtgtgttgggactttattttctccgatggaggttggggagagtgaaaagtattctattgcatctatatgccacattttgaacgtgtattcatcagttaatagactttgtattttgttatcttttgccattatgtgtaatgctatgaaaatttacgtgtaagaattttgtgttggtatatgttttcagttctgttaggtatatctacctaggagtggaattgctagagcacatgggactctgggcatgccatttcgcattccagagtctgtggatgaaggttacaatttttctacctcctttcttattcagaaaattccatgactatatttatttattagaaacactaggcttcttttcttttctttttttttttttttttttttttttttgtttttttcgagacagggtttctctgtgtagccctggctgccctggaactcactttgtagaccaggctggcctttgcctcccgagtgctgggattaaaggcgtgcgccaccacgcccggctaactaggcatttctgatgtgaatttatagtatattttttcttgatttgcctattgtctttttgttattatttaattgtactaagaacataactttgtttcggtaatgttgattttttttttcctcttgactgtcctggaacccactctgtagatcaggttgttcttgaactcacagagctctgcccacctctgcctttgatcttatgcttattttataaaatgggtctgagtattagagttggtgttaggtggccaactagtgggtgcctccttgggaagagtgagttctaccctcttctttcccagtccttattgcctgcagttctctggctgaggcccctggggttgtacccttccttgttagcatgtttgtccatgtgagttttcagatcttgtttaggcagtcatgttgttgaggcgtcatatctaggagagacatcccacagcagatttccttgtcctctggctccatcttcctgccacctcttctgtgatgtgttctgagcccgagctgcaggaatggtgttgtatctattgtgatgggtttccaccatgagtggttctctgtattttgggcagatgcggctttctgttgtggtgtcagtctgctgcagagagaagcttctttggtgaggggtgagagctaggattatctgtgggcatcagggtaaattttagagcacagttaggctatgctggtttagtaaagtgctggtgataggttctcgctgagatccgtgaccgcgctcgcttgctcgctcgctcgctcgctcgtcctgggcagttgccttgcttccaggcatcgtttccctcctgtcgagtgagccttaaatccaggttgttcccactggatatgagctgtactcacacacctctagggatctcctgctgtgctggtcgttgtcgtggctcgaatgcatcacagctaagtaggatattagcggtcccttaagaacatggtgttttgaacctccaggaccagtggtgtgcagcttttgatcatttccaatgaagtgacagaatattaactaagaacattcccggctgaaatgagattagacgcactgcttaagccgtctctcatgttttattgatgttttgtcatggtgttaaaatgatttatttttttataaaactttacaaaatgtttattttcaaattctatgtatgtgcacatgattgcgggcacccaaagggatcgaaggtgtaagattccctggagctggacttgcaggagttgtgaaccacccagcaagggtgctggaaaccaagcagtgtgtgctcttacctgtggagtcatctcttaagccattggtatgctttttcaaggatggtctcatgtagccaaagctggccttcaatttctgattctcccaaattttgaaactgcaggcccgagccaccatactggcttttcagacactgtaggttatgaagcaagtgcctgtgccactcccagttgaagtctactcctcagtgtggaggtcctagggctcgaggcttttgggaggccatctctcaggaacgacaggagccatagctatctctcctcaccactgtccaccttacacggctgcagcaagaaggcagctacagcctcaagaaagctcttgacctggaactaaattggttggcatcttgacctcagagtgctcagcccctgtagttgtaacaaaggaatgtttgtttatggtaacttgttggagaattcatactctcaatgacaaagtcattacacagaaatcatataatagcagctatcaaatgataaataaaaattaaaatgccattaaaaataaaacaaaacacattggattaaacttaacaaatatgtgcacttaagtattaataactaaaaaacgtgactagtgaaattaaggaaggcctaaatgtgactgtatatgtatgaattaaaggcgatagaaatgaggtggcaggtcagtcagtctatagattcagttagtcacatttgtatcaggattgttagtcatctttttaaaaggcaggatcttggtatggagtataggtggctttgaactcactgtgtagcccaggcttagacggaattcacacttctccctccctcctctctcccagcgggtttgcaggcctgtgccgccatgccggactttatattgtatcaggaattggggcctctaggaagttgtcttacatagttgttgtcacacttattttctcttcacagagaaagagagagatagagagggagaggaagagggagagagacagagagggggagagggagaaggagagggagaggacactgtgatcctaaactggaaatggaaagttgaatattaattccctcttcactgtctggaagtctctcagctggggctggggcagggtctttgtttgctttgttttttccttcagtcctgaagacagtggaaagtggaaatacagtatttttctctaccctcaattgatagttgttggaactcatagagtattctgttgaggtggagtgtcgtctttcaccgttagcaggcagtgtgagtggcccactaggtaattcccctaagtagttttcattatctgttttgacacagctgaaggacctgtgagtgtaagttgggcttaatactagtaactcttgctgtcttgtgcagactactatcctgttttatcttctaactacccaggaaagtaactgggaaagaaaaggaaatcttaactagctcactttcatcatgtccagctagcctgcagcttttaagacattgtagcataagcgatctgtgattcgccgtaaagagccaatatgtggtcagcttggttttgagtggtggcaaagttatagctttgaggccatcggtgagcttttgttcactaatgaccctggagggtcctcccagctgtgggaggtgtgggggacatggtaactaggaaacatcattgacagacagctgcattttggctgtgtgtttcgtcaagtcctgtgtctttaacggattttccgaatgacatttgcatcatttccccgggtggtacaattgaattgaggcctacttattttgaaacagttttaaaaactactgaacgccatcattttcagggattaaatgagagcatgggctgctttgcttcggccttgctttgtggaataattatttttgctgttgctactggttctgctactgtctcctcgggagtctagtgaatttttatacagagtgctggtttatgaaatagtatttggaagctgaaagttggagtttttgttttgttttttttttcttttgtccacttttggtaacacatactaatttttctctgtaactgagcaaactagggcaaatccatgattgcttcctgtcatctcattttgtatgtagggcacaatggtaacgggacataggctgcagggcggggctgaagataagagtggttaatgtgatgaccaggatgtaagcggcagtgcagaatgagtgatgtggggggtgcgagctcagcgcgtgagcttgtttcttatatgccctgttctatttaaatggaaacctccgttaactcagaggtgctctgctgttctccatctgatgggagagccttgtatgcaggcaacagcagatgcaaaacccggaggtgggctcattaaggtttctgagtaggcctgtcaaactggaggtgaaggggcaagggcagggatgcagtgggaaagaagttaggatgctctgttagaagtcctggagtctctcttccaggagggtgggctcgggactgtcttctaagtgaggtgcatggccactggtagtcataatccctgtgtaagtattttccagcggggaggggagggggcaagcctataattcctgcagagtgagggggtgggggaggagggctgaggcaggattatgagttggaggctattttgagttacatagagaattcaagggctatagatttcactgttggcattaaatttttcttttgctctgtaccaatacatgtgtttggaaataagtcttttttttttttttttaacttttcttgcttgcttgcttcttctaaagaagagtgccctgctatagcctgaactttctgtgaagaccaagctggcatcaaatttggagtggtatttttgccttcccctcatgtgtgctgagctacctacaggttcttctgccctgcccagatggggtatgggcaggcaagcttttcagatgctggactccagcaccccctccccccttgttcctttccttcccctgtgtgacaactgcaggtggcagtagcaggctgagggaagcagtggcaagtggagccctctagtgttacaaccccaagccagtcttgtgtatagagacccttagccttacaagtgctggtatcagggccttggcttctggcagaaaccagtattaaagctgtcatgccctgtgccctgatgattgatagctttctgggactcctgtgcgagtagggccctcaggttctnnnnnnnnnnnnnnnnnnnnnnnnnnnnnnnnnnnnnnnnnnnnnnnnnnnnnnnnnnnnnnnnnnnnnnnnnnnnnnnnnnnnnnnnnnnnnnnnnnnnnnnnnnnnnnnnnnnnnnnnnnnnnnnnnnnnnnnnnnnnnnnnnnnnnnnnnnnnnnnnnnnnnnnnnnnnnnnnnnnnnnnnnnnnnnnnnnnnnnnnnnnnnnnnnnnnnnnnnnnnnnnnnnnnnnnnnnnnnnnnnnnnnnnnnnnnnnnnnnnnnnnnnnnnnnnnnnnnnnnnnnnnnnnnnnnnnnnnnnnnnnnnnnnnnnnnncctcacatcggggacttcaggtagatcaggcctgaggtcaccctgtgtcttaagctttaggcagttgctgcagcctctgcagcttctttagtagctggcaggaacctatgctttgtgtgctgggaagccaggactagggacctgggtgtgggtgatgagtgggttatgtgagagagcactgctggcttatgggtaacaaggtgccagctgttagggtactcctgaggctactcaacctcttccactgtgaagcggctggtggatgctttgtccctggaaccccggagttagtagggactgccttgggcaatattggttcccagtgccaggcctgttgggcttccactcacctgtgtggtgtttagctgtcaagtctagtgccaggcttcaggctagttttccagtgaaaggttgctgctactgtctgcagtgatgcccctgtcctgtgtcattcctgcggctactagggtagactgttgtacagaagtgggcgaggaaggacgactccagaggatgtgtggtcctgatgtaacagcaggggagatagcatgaggaagtggctctgagcctgttctttaactgttcctctgcagcttgcagtgcagccccacaggcctccaagcctccctccggcagggaagtgctcctcctctgctgggagaaatggttgtctggctgggcattgcacatctactacagactgagatagccccgacgggcagggcacccagcagccagtgcactcggctgcagtcgtggacagagctgtctcaaggcatctgtggcatggtgaaggcagctggtgccggtactggggtagtctttctaactgttagggcagcatccttttctcatggccgctccagcagcaggagaaggcccagtagctgtcaatggggagccaggtttccctgtgcaaacagtgtccttgcttaagtgcaggagtgaacgtcagaaggatgtttctgtttgtatttgattttcctctcaccccattccttctgtaacagcgtttaaacttaccagtgctgtgagaagaacatctaatctgtggctttagaagttgctcaatgtatccatgcacctgctgcgtttattaaaccagttctccgcagttcacatccaaactaggcagactacagcttagctcccagcggatgaccctgtctgtgtaccatgtctctgttctgtgtaagactgctcctacttgggcagtgtgtgcgcctgtagtctcagtacttgaggggttgaggcaggaggattactgtgaatttgagaacggcctgggatacagagtgagtttgcggttgacctaggttacataatgaaccctagtcttaaagaaagaaagcccaacaaaaatttttttgaatgacccaaatgtcagctgtttaacaatcaatattacctgataatttttatcttgtcagatgtctgagtagcttgatgtgttacttctgagattgtggtcaggtcagggctgggatatctgaagcttcaggtggggaagggcttgctgtctaaatccctccttcagggtgccgacagggtgtccttcccccagcgttgttggactggggccttacttccttgctcactgttgatggaggcctcacttagctctttgtctttgggctcacaagaccaactagtaaatatgcgttccagacagacttgggtagtttaattaatgattattgtaagtagaatcctatctggtcacctgtgtcatcattagtgagttgtaagtgtccagtttattcttcattaagttcaaggaatgaggaatagcttggcagtgatggagcacacctgtaatcccagcattcgggtaggcagagtcaggcagacctctgagttcaaggccagcctggtcttcagagtgagttttccaggacagccagggctacacagagaaacccttgagaaggaagaaaggagggagggagggagggagagagagagggagggagggggagagaaataaacaatataatttatagcagtaattaagtaatcactgagctatccccactctgtgtgtgagtgtgtgtgtgtgtgagtgtgtgtgtgtgagagtgtgtgtgtgtgtgtgagagtgtgtgtgagtgtgagagtgtgtgtgagtgtatgtgtgagtgagtgtgtatgtgagagagtgagtgtatgtgtgtgtgtgtgagagtgagtatgtgtgtgtgtgagagtgagtgtgtgtgtgtgagagtgagtgagtgtgtgtgagtatgagtgtgtgtgagtgtatgtgtgagtgtgtgtgagagagtgagtgtatgtgtgtgtgtgtgagagtgagtatgtgtgtgtgagagagtgagtgtgtgtgtgtgagtgtgtgtgagtgtgtgagtgtgtgtgtgtgtgtgtgtgtgtgtgtgtgtgtgtggtgttgtgtggtactagggattggacctgcagcttcttgcatgctgggcagatgttccatcactgacctgtgtcactggcacgtccccttcccctaacttttaagacagagttttgctgagttggccaggcagagtttctgcccctcagtatgttatgtttctaaaatgcacttctaccagtgattgctccttaacacatctggttcagtttaaacttgcctggttgagagccagttatctttaaatatacaacaaactaccatttagtaggtgttgcctacttttctttgaactttacttgaaaatttcctttgacttgaaatttcctttgggctttaattgaaaactttaccatgaaaaatttcagattgataaaaatgatttgggtgaataaatatgtaccaagctgtcacaagctctcctctgttgatggacagctaggttgattccattttcctgttaaagtgagaagagcccatctgactgtggcgggatctagactccttgggatatgcccacgagcggggactgggtcataatagttgtctctcgattgccgagaagctgccactcgagtcccacagcggcttcatagttgacaccgcagcagagtttgctgtctttagttttcctgatgttggccattgtgagtggggtaagagggaatctcaaaatagatttaattcacgtgtgtttgccggctggttagaaataatcaacacttaaaaaattttatcaggttttatatttcttctgagaactgtgcgttcagaggattgattgacctatttgtttcctgccaatttcttgtgtgtatgtgtttacttttgcagttctttaaaaattatttttaacttgccaaaaattgtgaatatttgtggagatgtagggttgtgtctaagggtgcagtgccgtaggccagcaaagaacattgggtcccatggggctgggactacaggcagttggaagccactcactggaggtttggagaaatgaactcagggtccctgtaacagcaatgaataatataccatcttttttgtttgtgtgtgcctgtgcctatatggctgtatgtgtatctgtgtgtgtgtatgtgtgtctgtatgtatgtctctgtgtgagtgtatgtctgtgtctctgtgtgtgtgtctctgtgtgtgtacgtgcctgttgcatgcataaatgtgcacatgtgtgtgggatgcacaaccgtgaagtgagaggacattgatgttttttcatcaccctttgccttattcctttgagactgggattctcaccaagctcagggcttagtaatttggggagctggcttgccagagctgctgacatcctcctgttcccaccccacagcccgtgcgtcacatggtcactgttgatgtcctgccaatcatgcacagttggcctgagatgttgcacattagagatgaaatgcatacaccattctgatttagagatcgtggccttccctctgcctttcctgctgcatatcggttgctgttgttagtgagcagagacaagcacaggggttagagcggatctcgagagcagaaagctgctgctcttcctaccgtacagcagtagactaatagacacgggaactgcagagtaggagagcagtgggatgccaagtccaaacagaagagctaatgaccagaaagggggttaatattttggcttgacttaatttttatcttaagcattttttttaaattacctgaaatatttgaatatgtagatttgactgcttaaatgtatggtttatgtggaaagagcagtgtttaatcttccagaccggtcatgactctgcttcccccatgtcttcagggatatcacgtatgagatagcagtggaggccatctcggcaatggttgtcttcctttcctgccaactcttccacaaggaggttctgcgacagagcatcagtcacaagtacctgatgcaaggcccatggtatgttctgttttaacgttgtccttcataaggagcaaccactgtgattttaattgttatttcttttcatgggtgttgtcattttaccaacctgccctcccttcctgttctgttggtacttcatccccaacacaaggtgaagccacagccgggttcctgtccctctgtgctctgcctcgtcccccagttcatgggtacctgtcatagttgctttatgcagcaggctgctgtcatctcttccttcttcctcctcccctgtcaagtcctctctgtatattccagctgcacccaagtcttcctctttctccagctccttggaatctagttgtcctttggtatctgcagggaactggctaggataccaaaatccgcaagtccctaaaacatcctgtatgtaacccaggcacatcctcctctacgctttaaatcctgtctggatgacagatagttcctaacacaatgtgaatgctttgtaaataactgatatactgaatcgtttggaaaataatgaggagtaaagttaagtataaataagatttttttttctgagtatttaaaatttgtgattggttgaagtagtagatgcagaatctgagactgtgttctttgtgaatttgaagggctgacttctgtggtctgtgaccttttgttgagcctgccagtggccccttcactggtctgatttaatgagcatctacttatttactgtatgctacctacatgttggccttcctccgtagcagacacttatgggaacgtggctaaaaacactttcagtaaacacagcaccctaccttctcttgacataattttcaaaaagctttaaatcaagcaagtctttagaataagttagtttttgttaaagttatctgtaagttctagggatgcagctgtgggtagaatacttgtcaattgttatgagtgaaggatattgtccatagcactgtcctcgccttgttaccatggttacactacagcatgcatgttcacaggctcccgtagagccctttgggtaagtcacacaaaaaagatgcccaatgcccagggttaagactgcatctggtgaccttcttactggagactcccaaggtgtcactgggccttgtgcagcaagagccaagccagtgtgtggctctgtcttactgaaaagctactgggattgatcatgtgagctccagacttaccttctgacgtaactgacacgctccactgccaaacaccatagtgagttttcatctccaccatcttcctgcctcgcaatgaggattgaactctggtgtgaattgtaaaggagacagaccataatactggagcctgtgcaggtgacatttgaaagtcactgacaagaaggggaggcctgggctttggagacttctctctaaaccctaacagtggtggagtaacctggcctgcaggttatggttggcatgctagagttttgactagaactgtatttgttatggtgctagaaatataaaggttgtattttccataggtggggaggacgttagtagtcttactttgttagtctttggtttttgtagtgtcattataatgacaaatacttaagcagaatatttattgtcataaaagccatggtcatcaataatacatgcaaaaatctacaagtggaccagagaatatagaaattaccttgtcaccaaaaattgaataagcggagttttgcgcttacaacatgtgtctcattgctatttggttggcacattcctctgctgatttctatgtagcaacctgccttcagtagccagctgtgctgcactggccgttacatttataattacttacaattctatgtaagtgacaagcacatgcttatgcttaatggttggaatcgtgctgtctggtgtggagacagcgccagggtcaaggtttgggtcaggttgtgagatgctcacacgttccctgaggtagtcctagggacaaacatattctgtggtgttgtgcagaattaggtgactctgtgaacaggagtttgattttaatttttttttttttttttaccctttctatgtagtcttccctacaccagtaaacttgtgaaaaccttattgtataactttatcagacaagaaaagccacctccgcccggaacccatgtcttccctcagcagtcggatgggggaggactgctgtatggactggcatcaggagtagcaagtaagtccttccgtccttcacgtcctctgtctgtggaacctcttctgattggccacacgcagttctcctcacttggttgctgccaggagccattctattgagtctgggtagctggctaagtgtaaaagtgcaaaggcgttaaaatggcaaccctcccattctctgtagtgattcatgttaaatgtatgcaaataatgagtagattatttagctgtagaacataattgttcaagacgaatgtttatacgtaattatggatatcatgcaaggtctggctctgaagagaaagtaacatcaagccgtcggatgcttttcactcggtgcctgtaggcaacatctttctgttcagagactccattggctggggtttcactgcacaatctcagagctttgttcagtgacaaattggtagacttggaagactttgcagctaactctgcagcagcgtgggatggggttgctgaagaaaagccctttcctccctcacagtaggcgtcgtttctgccgcagagttcagagctagaggcagggctagcacgaggtgccttgggcttccttctgagaatagaccaggctctgagagctaacacagctgagaccgtgggctctgttataaaggaggagtagtaactcgacatccgggtagtctcctgcctgcagccgagcaagcagtaccttggatgggggtgggcagcacagggtggcagcttgctctaccctggggcttgccagcctctcactaagaagtctcaggcttgctctgtgagtcaagcaactgatgagtaagctgccagacttggtagttggcctgcccttggttcccatgggatcctgtgttaaatccatgtgttgtcgatcactcctcatctctctagggagccagcctaggatgccacagtgcgccgcttctgtactgtgccccacacagcaccgcttaggtgaggcctccttctgaaggccacatggcagtggttttctagtctctccgggacacagaactgatctcttggtctgtccgtccgtctgtccgtcnnnnnnnnnnnnnnnnnnnnnnnnnnnnnnnnnnnnnnnnnnnnnnnnnnnnnnnnnnnnnnnnnnnnnnnnnnnnnnnnnnnnnnnnnnnnnnnnnnnnnnnnnnnnnnnnnnnnnnnnnnnnnnnnnnnnnnnnnnnnnnccctcccttccttcctctcttcctctctctctttctcacctttctggtgtgagtacttggcatctgagtttttcccaatattctaatgtagctagagacaagttcattagttactttcttcaaaacagtggtcatacttggtagatttttgttgttgttgtcttaaacaaataaatttggtgccattagttttctgagtgcagaatccaggccttttacaatgtagatagagcccacacagcaggtactcctccactctgctgtctcccagctcaggcttacagacggtgtggttggacctttcctgggtgtaaacagcactggctttgtaccattgtatgcattgtgtgcttttaaaaattacttccttcaaaacagagtacattgtcttaaaaactcagtttgggatagtgatggtggggttggtcttgtgctctgtgtgttcagaggccgagttctggaccccgagtgagatcaggctgcagtctgggcatgggcattgtatcagccagtgtgctgtgaagaaggctccgcagtaatccgattggacagtaaaagactggagcctgagactggccaggagagagacctgagatggagtagggggtccacgtagatgcgaggaagaggtccccatgaggcaggatgggccatgtgcatgtggccaagagaagatcgccctgaggacacacatggagcagagcaaatagagcaagagtcggctggcaggtaactcagggcctgtggctgggatgtaggttagatagctcagaacctgccctgtttaggattacagctcattaatgaaaatactgggtttctgtgtcatttattctggaatggggcagactcctccctcccccataaaattacttttacatagtgcttttgttaacactggcagggcaagggcctcggcctgagctctgtgtgactctgcagcctttctggttttcttgttgttatccttcccttcctaacttacattaatggcatgagtgggaaggctgcttgatttaccaactttctggactggctatcccaggctgacctctaacccataatcctcctgccgcagctttctgagtgctgagacaacaggcaggcacagccacacctagctctagcataactaaatacttgataaaattaaatactaaaggctaacatgtacctgggaatggtggccatcttgtctttaattccagaattcaagaggctgaggcaggaggattaccagtaatttgagcccagcttgggctacaaatgtgaggtcttgtctcaaggacacaaagagcagcagccatgagagccaacaaccggtttgtgtctgtgctgagatgtgggctttgtcatcacagcagtttccgtcactgtctgactcctgcctgttttctctgctttccctgtgtgatcccatccacttgagttttctttgctcgtgttttactctgtgcagtttcaaggctgttcagcggtagagtggtgggatggatttccatccatcgagagtctccagggatgatcaacatttgctggtttacattgtatctctctcctcactggtaaaagaaatgttttaccaggaaatcagtttacgcattcagaaaacttccaagagcacagcagtacaaacccacttctccctgttccccactcttgttttccattttatttgctgtcattcgccgtcatcgtcactgcacttcctctttaaggcacttgtgggtaggttacctgcagcgcagccttcctccctcaggggcatctcttggacccacagtgtagctgtggtgactgaggaggggatcattgccaacgagtcactcgtgaagaaaggaaagaagtccctttacgaagtgtggtttcatttaagtgttgcacttaggttttgttttgtgttgataatgatcttatgctagctagcccagtgtgccggcactcaggcactcagtgtgcagtccaccctgagctcacatcgttccccagcctctcaagtgttggtgactggtgtgagccaccgccctgatccacagttaggttttcttgtaactgttttgccctcggtctctcttctgactccgttcctgcttgtcttcttcctacaacagccagccgctctcccattcctcaggagccgctctcccattcctcaggagccgctctcccattcctcaggagccgctctcccattcctcaggagccgctctcccattcctcaggagccgctctcccattcctcaggagccgctctcccattcctcaggagccgctctcccattcctcaggagccgctctcccattcctcaggagccgctctcccattcctcaggagccgctctcccattcctcaggagccagggccgtgttggctcagaggaggaaaaaacaccatgggaattgctcatacagcaaagatacaagtagaatttttgtttgtttctgttagagtaatgacaattcacatatagttttttttttaagctttttcagattcattgagtgcgatttcaaaaactggttggaatgaattgtaaattaatataatactttattataatacatgcagataaacatatagtcatagttttagagtataagaaattatttatagcactatgccgccagtataagacaaagactcagttgatgtatcactgttttggaatgagtgctttcattttttaaagttaatgtattattttaaatttgcagctgatttatcatttacgctaatcacagaattctagaatcacctgatatactttaaaaaatctattcatctgtctgcctgtcagcactattagatcttggcattcctaatccatagatagagtgaggtctggtgctaacatagagttatttttaattgtgtgtctgggagcacacacatgcactcctgcggctgggagcacacacatgcactcctgcggctggaagcacacacatgcactcctgcggctggaagcacacacatgcactcatgcggctgggagcacacacatgcactcatggcgctgagagcacacacatgcactcctgcagctgggagcacacacatgcactcctgcggctgggagcacacacatgcactcctacggctgggagcacacacatgcactcatgcggctgggagcacacacatgcactcatggcgctgggagcacacacatgcactcctgcggctggaagcacacacatgcactcatgcggctgggagcacacacatgcactcatggcgctgggagcacacacatgcactcctgcggctgggagcacacacatgcactcatgcggctgggagcacacacatgcactcatgcggctgggagcacacacatgcactcatggcgctgggagcacacacatgcactcctgcggctgggagcacacacatgcactcctgcggctgggagcacacacaggcactcatgcgctggatcacgctcgtgcacctgtggaggtgtgtgcgtgtgtctgtctgcctgtgtgctgtgtatgcatgcaggagcaagaggtgtggaggtgtgtgcgtgtgtctgtctgcctgtgtgctgtgtgtgcatgcaggagcaggaggaagtgttggctatcctggagctcgagctaatatgtgttgtgagcctgcagatgtgggtgctgggaaccaactctagttctctagaagagcagcaggcgctgctgactgctgagccgtttctgcgtcctcagtccctggctgctaaatcgcactgactgatttctaacacgcataaatgggagaccgtttgtcctgggtttgtgaggagtggaagagataagtgtataaaatcccacctaagaccatgacatctgtcctcgtgcagatgacctttgctgtcagtcctcacgctctgctggtgtttggtggtgaaaacagtagaatggtgtaaaacagaatgtgaatggaattttaattagaaacaaccagtgatgagagaaccctagggacatttatgttaagacagtgttaaaactcagggcatctatgtttctggtctgcttaaactttaaatcatgtaaaaagaaaagttttaaaagaccgattaatgaatatgcctgccacattcttgctttgtgtccagctggctctttgttttatgtggtgcaaaattttgtcagtgacagaaaggaaaatttgattattaaatagatatttccacaagaaatttgttccttcctaagtgaacttaccttgacaacagttgccatggtaccatttcgactcctctgaggacttttatgtttgtttcttttgagtatgtgtgtggaggccagagggccttgggtgtcctcctcaggagcagcttaggctaggctggctggctcatgtgtcccagggactacaggggcgaaccggtgccagccttgtatgtgggcattgtgtgtggaactcagggtcttgtgctcacaaggaaagcactttgctggctgaactgtcctcccagtgctgttgactataaaattagcccaaatgtttaatagagaaaatttgatgctgactcaattcaaattataataaatattcaaacattcatttaacccacgatatcattggtcttggtaaggcaattgatagctcttaatctctaagcacatcaccctatgctgttaaacatgtattataagcctgtgaccctcatgtccacaacttgttatgtttttaaagtgtgtcctggcctgaggtcgccttggcagccttaacaactgctgtttgtttctcatgggtttagaacctacaagtataacgtcaagatgccagcaagcttgcttcttgatgtgggtcctcttcctggcttgctgttctctcatgggaaccagaaggctttgtgtgacttcttacaaagtcactgtcgtacatgggggatctgctgtgctggcctcttagaaacatactactaccaaagatccattttctgattctgttccttaagagaactttaacatctgcttttgggggtaaccgaaaatccctccatagccaggcgtatcagtcatttctgtgtcactgcagtgagagccgggcagctgctttacaggacagagagggttattctggttcacagttgtggagattctcaagtccaagacttggtgtgctggactagccttgctggtgcagtcctgggccattacctgggaaggggcagggagtgcccccgcctgtctctttttagcccctttttcatgaagacactggtgcttagtcttgagggctccaacgttatggccccatctagttcattttttctacagccatgagcaccatagctggattaagtttccatccatcttctttctatcattaacataacttggttttaatctcccttgtgactcagaggacagccatattcaaaccctagctacatatcaagttgactgagctggattgcatggtggtggcttatggctttaatcctagcaaattgtatgatctatcttgtgcgatgctagctggggccgtgcttccagtcaatcattgttttaaaccacagcgctgcttagtgggatggtgagagttgtggaccaagtagatcaatctcaatcctaaacaccaattacaaatccaaaatggatatttttattttctggctttggatatttacattgtcagtatttcgttttggaggacaggttctagaatacgacaatttgccactcattgttaacagttgcaagcactgaactctggatgtacactgggtgagcaagatgaaatccaccctttgttagttagcatgggtgtttgagctctcatgtcctggtacaatgaggatggcacacgtgtgtcttcttatccacactctcacttacctgaggctaactgaaaaggccactgcaaaatcccagaaataagcagttggaaattcagtttatattgaatgcagtatgggcagtgcagtcaaagcttgcactgttgttctccggcctgctcaggatgtgactcctcccttcccacagtgtgtctgctgggtctggtagcacccatttgtcactgtctttagctattcttccttcttccacccttcttcaccctttttcttgcaccctttcagccccctaacactggatatgagagaaaaaagggtagaaaggaaaggaaagagatcctgaatcgggtcggaaagggggtggtgttatctgcagactgcttcctgccgaataggggcgtgagttccttggggcaagtttgatcatcaccatcaggatatctaatttcttcttgtttctttgtgatcaacaataaccatcaacctaccacttgtctcgggggccctacatttatataaatccctttataaagtccctagaattccaaatgtcacacaatcacagaatctgtctgctagaacacgatgcaaatcatagtcagctgctgtggacagtctgaagccaccccatatcccacacctgggattaaaatgaaaacatattcttacaatatttctgtgttttctaaaagaccccaaattccaaattctcactacacctgtagtagccattttagaagcagatggactatcataatcctagattcagagaactctacttaatgatgttccttagttgtgatggacaattgcaatttgggtatgctaagcagaaaccatatttgctttcctcacataaaaacttttgacttaataaggaaagaaaaatggttgctaagagctatgatgaaatgagtgtggatttatgaagagaaaggaagagctgcagagatggttcagctgctaagtgcttgctgtcatgtgaggcatgagggtgtgagtccatgctcccagcatccctgggcaacctggcacgactgtgacatgcatgcctgtaactccagcactgtgtgtgtgtgtgtgtgtgtgtgtgtgtgtgtgtgtgtgtgtaaaatcttagtaatgcaagtttcgtaggatctctttcttcaagcattcttctaggggcattagaatacacccctacccatgatgggaataatgtaccttcctctgtggacagctgagaccaggtgagtaaatgcatgaaagaggcagtcaccacatagctttacaatgaatggccactaattataacatataacccctagtaatatggaaactatagtatttaaaaatcctttgctggctgtggtagcataatgtcagcatttgagcgtcagaggcaggtgtacctctgtgagtgcaagccagcctgtagcctgttctaggatacccaagccagctgtagcctgttctaggacacccaagccagctgtagcctgttctaggatacccaaagctgcatagtgagaccatgtccaaaacaaaacaaaaacaaacaaaaacccccagacaagaaactatataatgtacaaacaagcaaaaacaataaaaatatgttaaaaattgggcctggagagctggctcggcagttaagagcacactggctgctctcccagaggacccagggttgattcccagcacccacctgacacatggcatgaaagtccaggtccagtgatctaatgccctcttcttaggtactgcatacatgttgtgcacagacatgcagacaagacatgtacccatatatatatatataaatagaacaaagtatgaccttacaatgatttacaagtttgctttggttttttctatgtgaataacttaagaaataccagatgcttgacatgtgtatttgttattctatactatatgtgaagtatagtatatacaatcatgctttgcttaattgcaggccatgtgataagaaatatgtcatattttaacatacaaacatcaaattatacttatacaaacatatattgtaggcttagatttttcacaacctactttaataagggttcttaaatgtttaatctcccttctagtccaccatccaacaaaggtagtgggaaagaaaggttgttagggcagagggggatgtggacatgtttagaaatagttctttgaggcgattccaaccttcattgtcagcattccagttctctagcagaacaccaatacgaatcagcagtgcagtcaagtccacttggcaatcaccactcactaatcagcaaaggcaatttaatccagaagagaccgtgaggctctgctaattaccctgagtcactagaagcggcaagaaggctctggcttatcacgagatgttctttggtgagtttctctctacaaagtcatgacaagtgaagatgagcagggtgatgcaaagcaaactagaacttgagcatagtcatcgaagaccagtggggaaaactggttcatcaagagacacagcagcatcacatacagaggcattctctttataataagctttaagtggagggagtataatggtaaaacagtgatacagtgtatgtttagcaaatgtgtaaaccagtagtatagctggcgatagcatgctccaagcatgatagtggctgtgtgtgacggttacagcagatgcttatgaaagcatcgccacaaacataaacatggtgtgctcaggtccgatggctgcgacgtaactaggtgctgggaattttcatctttgacattacgggaccaccattgtacatctggtctgtcattatgcagagactcagggttgccactgaaggaagtccactggagaagaaatgaatagtgaacatctagttacttctgtgtctgaaacattgttcatcgggatgcgtggctttgcagtttgtgtgcttcgttatgataaagccgcactgtcattatagttgggtgtctaagccggcttatgtgtactctaccacactgcttccagtccagtctcaggttttatacagtggcttctgaggaacgctttcccacttgactgaaccatcaaagctgtttcatttcacttgcttgtagtggccagtgtccacagcagattataaggccaagtttaggaaaatgtagtaacagagaagttaataaagtcaaacccaacgttcccacctctgcttcccacagccgggtatggtgacacactcgtttgatgccagcacttgggaagcagaggcaggcagatctttgtgagtttaaggccagcctggtctacagattgagtttcagaacagctggggctacacagagaaaccctgtctcgaaaaacagagaaaagaggtgataacacaaacaacttttttttttttaagatttatttattgttatatgtaggtacactgtagctgtcttcagacacaccagaagagggcatcggatatcattgcagatggttgtgagccaccatgtggttgctgggatttgaactcagggcctttcgaagagcagtcagtgctcttacccgctgagccatctcaccagccccataaacaacttttattcccccgactgctgttctgagagaattactgagtgaaccatgcagactgtggcgctcagtagttggagcttatcttatgtgacggttcttttcccccagtgttggctcctgctcagtgggctcattgagagaaagtgtgcctcactgagaaacacgcatcaccgcaaaactgacagactttcaatgatacatctcgcacgtcacaagagagggctgggtaatgatagtggtgcgctttaatttttatttggaatgctctggtatactttattcaacaagccaaagaataaccctttgtttttgtttattttgtttttttttttcataattaaattcatctatttataaagtgaagttaatttcaggttactgtttgcaatagttcaggaataagtaggggccttattaaagtaagcttgtaattctagtagtctagatgtcttggaaggcattattaaatgatttttttaatgtgtaattgggaatcaccatccagaatctaccttagttttgtaccttccttgagagggttacagcatgtccctgagggggttccagggcttgccataattaatgttcagctaaaatacaaggtgctttttgctttattagcacaagttaaaatctgtacattgttaataaggagcatactaatttttaaattgaaatgaggtagggtttatgtttcatgatctggcagagcaggctttcaattcttacaaatgtaacagtttccactggtgtacttcattccacacagtgctgggttctataaagacgctctgtacacgtttaagatggtaatttgagcgaatccacgtaccttttttccctttatcaccctttttcttccactaacctcctctgatccccaggacactttggtctctacttttatgccatgtatatgattttatgcatctgtatgaaatcttggcgccacaggagagacagtctgacatttgagacaagtttatgcactctgattatgtccggctccatcattatccactttctcctctccccacttctcctcaccaccactgtactggctggttttgtgtcaacttgacacaggctggagttatcacagagaaaggagcttccgttgaggaaatgcctccctgagatccagctgtaaggcattttctcaattagtgatcaagggggaaaggccccttgtgggtgatgccatccctaggctggtagtcttggttctataagagagcaggctgagcaagccaggggaagcaagccagtaagtaacatccctccattgcctcgacatcagctcctgcttcctgacctgcttgagttccagtcctgacttccttggtgatgaacagcaatgtggaagtgtaagctgaataaaccctttccttcccaacttgctttttggttgtgatgtttgtgcaggaatacaaaccctaactaagacaaccaccctttcttttgaggtaagatctcttgtagacaagtatggccttgaactcctgaaccaagcctagctaaatttgttctttatgtctgaaaagaaaattcagttgagcatatatgacactcagtcctttgttgatggccacttaggttgattttctcttcaaaggaaggagtcagtgatgaaggtatctttctgacatgttttcttggagctgttttgatttttctgttttgtgatctgttgaatactttgtaatggcagtaataacagcacctactcggttccatcttacaagggaaattgatggcccttttcgtgccataaatcgttggggactaaagccatttgcactcaccaggaacaatatagagtaaacggtctccaactgcttgtaggctggaagccgggactttattttctctgtaccgttcttcaagatggtggataaaaggtaagaagcctgacacaaaggagcggcagcctgcagccatggctggtggtgctgtggctgctggtacagccataaaaggtgacccttaggtttaaaagccaaagaaggggaaccccactacagcagaaactctggcctggttagggaaactggcaagtgcttcctggtctcctctgtattccagagaggccccagagaaaagaaatacttagacacaaagtctaagttagaaagagaaagaggagacccttgctgctgtcacacaggcagctggtgatgataaggatggcattacccaggactaagcttcacgggatgccctggacctgggtatgttcctgctgaagatgtgtgccctggacctgggtatgttcctgctgaagatgtgtgcctaggacctgggtatgttcctgctgaagatgtgtcttggaaactgacacaatcatggtgaaactggagaatcatggcgaaaagcccttcagcaggtatgtgagaagactgtgtgcgcgcatcactccttggggcattcctgatcaccctcgcctggcaccacaggggcaaggagtggctttcctgaagcagcagaccagtggctgctacttgtgactcgacctcttgtcttcagctacatagaacaccctgaaatttgtcatttccacctctacaaatactagcaaggttaattaaagacgtttaaaggcagctgtgttcttagtagtttagccagttctcggtttgttgctgcagtttgttcttgatgtgggctgtatttcctgcattgaccgtgggaaaggacaggttatgaaaggactcagatgtccatctcaggtaaaagtggtgcatttggggcctactaccaaggcttttagtgaatatgctgtgtgtaacagtggcatactcccacattgtagctgaagacatgagcgccaggcttagcaagcctaagcctgcctctcttggaagcaagtgcagcctgtaaagggacatgcgtagaagtggcacaggtggagggacaggtgcatttctaaagggttcgtgtgttcttccctccctggctgacttgagttcagctgtgattcccggtgcttgcttagccatcatgggccacaaggaaccccaagaaggacagtcatgtacagagaggccaaaagaggaaaggaagccagcgttcaagagttgtgagggagcatgaacaaccacccagcaccttcctgcagccaccttttcacaactctccccagtcccagcttagatactgaaggcaggctggggcgtgggtgtgctgtgtccctctctagggtggctggtgtgagtgtcctcattagagcctattgagagtggagaagagtgggagaggaagcacccagaacaagtaaaggaagacacaaagcagtagatttctcaaactttttcactgtccacagacagcgccttatgagcatcgttgtcattcagaactcgcgcaaggaggccatgagaactgttcccagccaacagtgagccagaatcatacatgcagcaaggaacacatctgggctcttaggtctttataagttcatgtgcttttgaaattctgctttggcaaacatatctccccccctccaagataattatgtgcaaattgaatttctttatttccttttccttttgttttgttttctgaaacagtatcccactttggagccctcgctgatctggaactcacagagctatccacctgcttctgcctcctgagtgctgggattaagggcatgcgccaccttgcctgactctattaactacatgagagtctttgtgtaagattaatggcgcaacaaaatgttgtttgtgtggcctggcttattcctgacatgagcaagagctcatatttcccatttaaagtaacgtgatatatgtggttggaatctactagaggtgggtatgggtgggtctgtctctctgtctcccagcttcactggaatagcccttggctggcctggaactcactgtgggctgacctctggcttgcagtgaccctccctgcctcagccttctgagtgccagcatgataggcttgagcccccatgatggcctgcctttccctctgcttttagagtgatgtagtattcttaaagcacagatgttgtacttaagctcccttgttctgtgaccttagaagggtaaatgtccccaagtctgctttctgttaacttttgtggcctgaggctttagtctcatgccttctcttcagtgtttccctgcactccatatcagatgcaccctgcgccaaagtctacgtgtggtttttaaaatttacttctgtctcttctgtatgctcggtgatttcctcagattcatacttcagttcagttccctgacacctcttcagctgtatctgatacactggaattctggttgaagtttctgacatttaaatatacacacaacaggcagaagtgtctgacagataataacgtgtaatgaaatgtaaaccctgctgcccagctgggaacagattacgtgagatactgagtaaggtaaggatttaaaatggtgtgctgggtgaggtgaggtgaaagttggctagtttgtcatgggtcctttctttggagtgctgttctggaaggtcactagggtagactgatgggaaatggtgtcagagtgccacgcctaatcctgattgtggggagacaactgggtgtgttgtttgaggcagctccagaagggattaaccaagtggggcaaacccgtcctgaccatgaatggcaccatcccctgggcacctggatggaatgagggaaagaaggaagtgcactggaggacgaacattgggggaagcgagctggaggaaatgcattggagggcgcacgttgggggaagcgagctggaggaagtgcactggagaacgtgcactggaggaagcaagcaccctcctcctagtgtgccctctgcagtttgatggaccatgcctctgaaccctgaggagtcttttcttatttacactgtttctcttaggtatttgtcaccgaaaactgaccatctcacagggtataggcagagtcaggatagctagaagtatttatgaagcagttgccttttgtaggccttatcattactgatagagaagtgatgctcccgaggaaaagaagagatggtctgtctcctgtatgataggagcaagggccgagagctcgtgggttttaaagaaggaccttctctttgaatcaagttttcagttagcacaggtaagcgctctgcgcctggaggttgaggattactttggaagttgaaagacagacacaggagagacagtggcccggagtggggatccactagagatccatcacacagttaagtcagagcaagcagagcgaccacagcttgttcttcggttgtgtgtacttgctgtaggacatggtgtcagtggagtagtgcatgcggtcaagatcaagtgtaggcttggaaaggaatactcgagagggacacctgcctggtgcagagcccgagcctccaggatggctgaggacgagtgcacagcaaggctgctgacagagggaggggaaaagctatctgagtcagggaccggaggaccgccctgactgcggcctgacgtggattcaaaactgcattgaagtgcagcagttagttcaggcagccggtggccatggtgtgaattagtaaggtgcgtgtacaggcagcctgtggccagggcgggactaggaccacatttttgcatgaattttttggggggacgttgaaatgttttaaacaaggatggttgtgtggaggatcagacagtgaagtagttgctgacgttataaatgtgcaggagtgctgctgactgccagggacagagcaggaaggtgtgagggggacagtagtccggtgagatgcttcaagggatttgtgatgtttgaggaatgatgctttgcaggcagtcatgtgaattctgcctgtaggagcgaacacacatcactgcttgagaggattcctgagaaagaactgtcctggggacactcagctagcttcctgtgagtccagggcgttcaaagaaacagactgaaaactcaaggttttctgatgaaagatgtctgttttagaaggtgtcaaaggactgggatgcggagacatgggggtgtgcatgccatgtggctctgagcccaggtggatgcagcttacgactctgttggccatggtaactggtaatatacggcatcgcggatgatggtcttaatctttcagggtagagtaaataataaatcctacttgtagtatgtgacaatttgtctttatgaggttgtcgatcccttggccagggaagtattcagacctctgggagcctgtcttattgtgtggtcagatctgtccagtgtaagaaggcatggctttaccagttatgaatcactgtacccttgtaggttagccagaaaacccacaccacattcattcatcatttctaagctcacttaatcatcttatacattaaaaagctagagctgctgtgggtctgtgtcttgccccactactggggtgctgggcagacaagagtggagatgttaggctgattttactctgggctgccactgtcgggtgctggactacagggaagcaccaacacacccctcagggggccggaaaaacacagtctaacatgtgggaggctgaagctggggcttccaagttcccaggtattcagtcgctgttggaaaaccacacagaggagtcgaggacaaaggattagaggtccacgggcctgcaatgaggctgggcctggagcctcccaaattcctggacatccaggcatacatatgtgcaagacatacatacatgtattatctttataaaaattgtaggcatttaaatatagtgacagtaattcattacatcacaggacaatctgggcaagacctccaagagtataacatagtgtttgttgaaggaatgaagcacaagtaagggccattcgttaggcgaagtcaagagatataaatgcagtgctgcaatgggcagagccagcaaaacgcatcaaacggaaacaccactttcgccgtcgtgaggtctccctttcctcgggggtgtgggttctgtggagcaggaaggacagaggaagggtcgtggttgagagagcctcctctagagtcggaacattagtgtgggtccacacgtgctgtcgtggggtcgggttcgagtgcttctcctggaaagctgtgttaatgcggatgcttacggagccttcttccatgatgtgtgtgccattagctgggaggatgctgctgtcgtcaccttagcttccttctttctgcccaccccgccccacccctggtcccttgagtgtggcgtctttaagctttattgattctctatcctatcagtgtaatctttaagtgaatggcttgtaaattttatgatgcattgttattgtgacatcataagacctgcctgttgacatttttcagtagatgagattaataaaaagtttaaagtatttaaaattatgctatcaataagactgccttttgatgtaaatatattagtaaaaatttgggaacatttttaagtgtttgctaattatggtgccttgggaagtcctgtcacgcgggactgtgtttcttactaataaagggagctaagtctgtttcagggtcttggaaatggatgggaaacagagaattggtaatattttcttttttttttcttttttttattaggtattttcctcgtttacatttccaatgctatcctaaaagtcccccataccaacccccccaatcccctacccacccactcccactttttggccctggcgttcccctgtactggggcatataaagtttgcaagtccaatgggcctctctttccagtgatggctgactaggccattttttgatacatatacagctagagacaagagctctggggtactggttagttcataatgttgttccacctatagggttgcagttccctttagctccttgggtactttctctagctcctccattgggggccctgtgacccatccaatagctgactgtgagcatccacttctgtttttgctaggccccggcatagtctcacaagagacagctatatctgggtcctttcaacaaaatcttgctagtgtatgcaatggtgtcagcgtttggaagctgattatgggatggatccctggatatggcaatcactagatggtccatcctttcatcacagctccaaattttgtctttggtaatattttctttgtttttatcttataaaaagataacaaagaagcccacattggtaatcagagggtcagctctgctgggtcttatgcccttgtaatgaacatagatggctactctttttcaatctttgatttcagtgcaagacattttaaaaaaagtctgtggttccactggttttaagtagattttttttctttctgagaactagttaaggctgggcaatcttacaaacgccctgaaccacagtgggtttcattatgctgaaagggaaggagcgggtggggcccctgtcctcttccctcaggaaacctggggtgccatgcgacagtgactttggcagatgggctgagggtgggcgccagcgccagcctggtaatgctttctgttcctgggctcctctctggcctggttggtgtctgctcagggacctgcttgttcattcagtgctgtcaggataggacgcaaccccaggagccttctcaggccccctgaaaccttgtcttccccctcctccatgttacatgtttactacacgtcattttcatttgctgattgtgtcttggtaacctctggattcattacttttaaatcttctcttttaaatctccgtatgtgcctcccatttcaaagcgtctactctcagtgcctctccggctttcctcccagtcctgcctatgtagaggtggtgctgtagctgcctttgttagggcctggctcagcacacttcagaggctgtcttcccgctattgccagcataactgggatggtttggagaaaattgcagccatctttctctgaatgtgccttgccttcagggagtagaggttactggggccctcctacctttgcccacagtgatctcacgtggaacctgtcctggcccttcttttcatcaggaggcagtgcagaaaaataacctaaaagtaggagtgctttgtcacgcatgcaggcctttggctggtgtgcattcttcataagtggtatgtaaatgataacgtaagcaatgagaaaaattgagagtggaaaccttttatttgtagattctaaattgattctttctgggtatgggtattgctaaagttaatttttctttacatcttttagtacatgaaattagtatgttaattgtttataacaaaatcataaatatttcaggcttcaatcttgatttttatttggcaaaaataaagaatttcgtatacacatttttacatatcaaaaaattaatctgaagaacgtgaaacttgcaagcctcgctgttttcctgtttactaaaacagtgatgggtcacagtggtgtgcagacgccagaccaccacgaagaggggtgtttgctctctggggaccatgtctggacagcttcacatgccacagttttgcagtatgacagctggggacagaagaggtctgtaggaaaacctcgagtctaggtgctttgccaggcggggtggggctttgcgttgtgggttgagtgcacactgtattgttttaaaaagacttttttttttttaagatttatttatatatgtgagtacactgttgctctcttgagacacaccaaaagagggcatcagatcccataacagatggttgtgagccaccatgtgattgctgggaattgaactcaggacctctggaagagcagtcagtgctcttaaccactgagccatctctccagcccccagtggaaaagactttttaagtgggggtgcttaaggggcagtttcaagacagggtttctgtgtacccctggttgtcttggaactcactctgtactgtatgtcaggctgacagacgtcctcctccttctgcctcctgagtgctgcgattaaagacatgggctacgacacttaggaaaagacgtaagtgaaacttaacaagaatatagattattagcatttacttcagttaattatcataaaatcagcatgccgagttaagttaaatggttcttgtgtaaccagaatcttttcttagccattttcctaacaccttttctttctaccagcaaagaaaacataatcccaacttataaaactgtagactgttgtcgctgcacacaccaagggatgggcttcatcgtgacctctactaggcttcctcttggtccatcctcttctcccctccagtaatctgtattgcagattagttttgtctgttttgagctttacactcacagaagcctgtggaacgtattttgtattgtgtttttatttgtgaaatccacgttctgtgtgaagcacagttcactgggtttattacaatgtcttatcacaatgtaaagccaacagtttgcttactccttatgcatgagtgtgcatttggtttatgcgtggacttgggctacgttcgtgctctctacattccatgctggtcttaccgccatgtttttcagtagcagccttggctgccgcattgaggttcccagtgccgtgtctccttctgaaaccatggctttgttttcttttcttttctgcccactcgtcccttttcattgtagacctgcataagagtgattacgataaccatgttatactaggctgttttaaaatctcctctgccaaaggaattaggtgttatttacaattcacccttaaacaagttcttgggacaaggtcagaaagcaaccacattctttgccaaaatatcacaagaatgatcgttagcctgcttgctaatattgctcccccctgaaacctcgtgaactgggcctccatagtccacattgctcttggtactcaagttcaactaccgttactagttcaaagtcccaaagtcttccacagtcctccaggagccatggtcaggtctgtcacagcagcagccctctgccaacacctaccttagttttccttagctacttttctgttgctgtattaagacaccatgaccaagacaccttatagttaagaatccatcatgacagagggaagtgtggcagcaggcaggcatggtgagagagctggaaacggagagctgagacctcacatctcgacccaaacaggaagcagagaacaaactggaatgactgtcagtcttcccccagtgacattcttcctccagcaaggccacacgcacctcctgaatcctacccagtccatctggggcctaagagttcagatgcccaagctatgagggacatctcattcaaaagaccacgtgaccttttgcctggtaacattgtagctggggatatttcccaagtcctctaggagggagggaggcagccatagcactgagatctctacaggcagatttctgcagccatcttcagactttatggcccttacatgcaccagttacctttctagggctgtgagtctctggaagtcagtagcctactagagctttcatgttctcagaccctagcagatggtttccagaacttgatccacccaggtcctgtgcatctccctgcatgtcaggggctgcttccatggctgctccctggcctcatttcaacacccccccaccccccaactcagttgtaagttatcagtttcctgtcaagatggcatctagctacagctcactgattcagggagcaccctccctcccaactccaaaagacccaggttcagctatgcctgcaactgggtttgagagccatgggcttgtcctgcggttaggactctcagtgacttcgctgtcagattttgcctcacctcttctgtgacttttacctactctctgtgacactgctcccatccacagcagtggcttcttgcctgcctcttacccagaagctgacaagccagctgttttcttccttggtacttgttgagttcacagtgccatcatctatcacaactctgtcctcatcacattttcatccttgggaataaatatatttaacttagaacttcaaaatggtatcaacaagccaggcgtggtggtgcacgcctttaatcccagcactcgggaagcagaggcaggcggatttctgagttcaaggctagcctggtctacaaagtgagttccaggacagccagggctacacagagaaaccctgtctcaaacaaaacaaaccaaaacaaacaaaatggtatcaacagaagattcatttttgtgtttttaagacttctttttcttctctgtttgtttctatgtctgtgagggtatatgatccgtgtgtgggggtaccacaggggacagaagagtgtcgagtctagaactggagttgtagatacttgtgagctgtgtggggttcacaaatgatctctggcttcctagaactgcagtaagaactcttaactgctgagccatctctccagccccagatttatttttttagttagcatgaattcttttaactttttgctagcttaattttactttcagagcttatttggaagacccaaggactataattaaaaaaaataaaaaaaaataaacaaccccaaaacaccgggaacttccttaatgtggccttaggaacagaaagaaacacactgtagctttcctttatttttctggtaaagagaattttctctttttctttttgccaacaggaaaatgcagttccattaaggttcttggtcatagatcagaggcttgggtctacaagaagtgagcttttggaagaagtacggtccaatatcatgggccagttcaaactacaatgtaggcagtggcaagctgcctcctccaccctctgaggaaaggcagctgtgagtgcaagttaccagagacaggaaggtggtcgagcgacccagtgagggtgtgtgtgtatgagtgaatgtgtgtgtgagtgtgcgtgtgtctatgtgtgtgtgcgtctgtgtgtctctctataagacgctcccagattcctgggaacagtttgaaagagtaaaagaagccatcctgaaaaggaatttgttttctttgtgcatttcatccagggcaagtcggctccagtttctcctggtaatgaagatgaacagctgtgagggaaacccaaaagcagcgcttaggttgtatcttgaagaggctttccgggttgtgtttgttgtgggttgaattttctaattgtgtgttttctttgcctacgatcctggtacaaacagtggtgaacacacttgtgcacagtcttgggcagactctgggtggacgggagtgacctaaatttcacagatgtgtcatagataaacaaccagctccaaaggggaaattggtttctgactttttttttttaattttttactattaaagtttttttttttttttttggttaatgtgccaactatttcagcttttttcagaagctcttgtgaaacagcaggataagtttcatttttttccttttttgacatactatttatattgaatctttgagaatgtcacatcatgcatcctgatcacactcatttcccaatcaacccttccatgtccgtccccacccttgtgaccaccctcttcccctaaaaaatgtaaaataaaagttaagaaaaaaaagtccagtttgtgttatctgtacactcactggagcatggtcagactctcagtggcctgcctcctacactccaggttcttttcaatggcttcctgtttaggccgctactttttggagggaggggtgagagctagaaaagccttttaaatcacatctgtctctttgtctgtctgtctgtcaggcttcttggcagtaagcacaggcaacaactcaccgagccatctcacagctctgcatttcctacataggtttaattttctcttctgtgtcatgaattataccaggaaatgttttgaatacattagacttgtgatgcatagttgtcagtgagttgctgagctttacccagttttcctagtgagagatgttcctaccttcccggatcctctgccaatgccccctgcagtaacagggggagctgtcagatgggccccaggaatgagaatggagtctccctcacagccctctggggactgctgaacttaggggaggctgtgtactgcctccataataatattcaaaagtcaatagctaaatccattgaaatgaactatagagtaagttagagagactgaaggcaggactaagtagttaagcccagttcagtcccaagcaccatgtcagctgacttacaaatacatacaacacttgctctaggtgacccaacacctgaccccaggtcttacacgcgttctcgcgaccggccaggaagaacgcaacaaaccggaatcttctgcggcaaagctttattgcttacatcttcaggagccagagagcaagagctctattgcttacatctttaggagccagagtgcaagagagcaagagcaagagcaagagctctattgcttacatcttcaggagccagagagcaagagctctattgcttacatctttaggagccagagcgcaagagtgcaagagccagagcaagagtgcaagcgctttattgcttacatctttaggagccagagcgcaagagagcaagagccagagcaagagagcaagcgagcaagagagcaagagcaagagcaagagagcgaatggcgaaaccccgtcccttttaaggagaattattctccgcctaggacgtattactccttgattggctgcagcccatcggccgagttgtcgtcacggggaaggcagagcacatggggtggaaaactacccttggcacatgcgcagattatttgtttaccacttaaaacacaggatgtcagcgccatcttgaaacggcgaatgtgagggcggctccccacacccaggggctcctgcacacatgcgcacagagacatatgctgatacatacacaattgtgagcataatttaaatttttttagagattaaaagtttgtgaattgtatgttttcaatttggtaagaaattgtatatgtatcataataaaaatttagatttatttatgtatgtgcaccacatacatgctgactgcctgaggaggtcagaagagcatctaatcccatggaactggagtcacagtgatgagctgccatgtgggtgctgggaatccaacctgggtcctctgagagaacaaacacttaagggtccaggttcagctcccctcaactgtatggagactcgcaactgttcataactccagttccaaagggtctgacatcctcttttggcttcccctcctccttttaaaactcgcagtcccgctgtatagtgcattgcattttctgggtgggtgagcaagaactccctcctcctcctgccgccctcactggtttgtaattgcttgagttctgttgggatgcatgtgtgctgtgagtgatgccccagcaagccagtgagtgggaactgccttcctgtgtactcttatccatggcctggcacgctcgggttagcacacttacaggtggattggcgggcgtatcctaacagcgttctaaaacaacgtgacgtgttattgtttacaggtcttggttttgcaattttccctttttacgcaacgatatttgaatatctgagggtttctatgctccacaaaagagtctaaattctgttgttttcatttaacataaaattttttggacatattttcctgctccccaactctgtacccacccaaccttatgttagctctttgctctttcacaaaaaacaaaaaacttaaaaccagaacatccccacacaaaaagaaatcaaaacaaaggaacagcaaaaccaaaagtgctcaaataaaccactgaatttgttttgtgttgggcggctgctcctgggtgtggggtttaccctgcagtgtggttgatgcacccagtgacactccattggaagaaagctcatcttcgctttgccagtgggtatcaattacagatagcttcttggttagagttcatacctcatattatacttcccctctcagtgctgggaccctgtgtggcttgaattagtgcaggtctgtgtgcacagtctctgtgagttcatacgtgcattggtcctattgtgtggagttaggttatccaccacctccggctcttagcatctttctgcgttttcttctgcgtggctccttgaaccttgaggggaagagctttgaggaagatatctcatttaagattgagtgctctaaagtctgtcacaccctgcacacggtcctgttgtgagtctgtgcaagaagcctgtctaatgtgtgttgagtgaagcactggtctgtaatgtcgttaggagtggttttatcgttctgttcctttagcatagtgagtgtgttaggttctccctaggcccagagcttacctagctctggttctttccacaaagcagtgccaagcagaggcccgtagatccaatcaagaagaggtggatacttgcggacatttgtgcagctggttgcagcagtacatcttgcaggaaggccatgatctgtaggtcacgggcttgtggcagggtggtcttcatgacggcttttctcctgaagcgtacggagactcttcagcaccatgacactcgtcagtaggggtgaagcttctaaagttgggtaccaccgtgacccctccgtgtttgatgacgtaagtaagtgtggtctgcagcaatcgggcctgagcagcatcaggttgtggagcggaaatagcctggcactcgcctgtgaagctgggcgatcccacagtgctcttctggtcagccgtcttctggcaatggagattcacttgagagcacaagtgtccagaggcactgtgttcctgtgttcctgttacctggaaactttacgtaggtcactttcacacgtgtctacctctcagggagcctccgcagcactcggttccatacggcttcccacaggcctttagtgttagttgtctgttagttgtctttagtctgtgtcccctcccttgggggatttctcctttctccttctccctggttccttacatgatacttaacctctatggttatttgataatagcacacataggtaaggtttcaaagctatccacacataagagaaaacatacgatatttgtctttttgctcgtctgggttaccacactcaggataatttttttctagtccacccatttgcctgtagatttcatttttcttaatagctaaataatattacagtgtgtgaatttatcagttgatggacatctaggtggtgtcccatttccagccattatgaacagagtagcagtgaacatggctgagcacctgtctctgttctttggatgagggtttctttgggtagatgcccaagtgtggtagagctgggtcttgacttagacggactcccatcgtcctgccgaacggccacgctgatttccgtagtggctgtaccagtgtgcactcccaccagcactggaggtttcccctttccctgcgtcctggccagcatgtgctgtcgtttgtttaattgatcttagccattctgactggggtaagaggaaatctcaaagtagttttaatttgcatttctctgatggctaaagctgttgaacatttcttttaatctcttctcagtcatttgagtttcatcttttgaaaattgtttagatctgtactccaattttaattgggttttctttatgttttttttaaagttatttatatagtttagatattagcccttttttggttgtgtaattggtaaagatctgtcgcctgctgccttgtccttggctatacaggagcttttcagtttcatgaggtcccttcactatttgttcttagtgcctgtgctgtgggtgtcctgtgccaacgagctcaagcctgctccccagcttctcttctaccaggttcagggtatcaggtcttcctgttgcagtccttgatttatttggagttgagttatgtgcagggtaatagatacagatttattctcattcttctacatgcaggcctccagtttgatcagcaccatttgtagaatatgctctcttttcttcagtatagttctgacttctctatcaaaaaccaagtgcctgtaggtgtatggcgtcgtgtctgggttttcattttaattccattggtcaacacgggtcttctctgtttccaaatgaaggttttgaaatttgtcttatccatttctgtggagaattggttgaagttttgatggtgattgcattgaatctgtagatttaacctggatcatttcttctttctctgtacctattagtgatacttttggtctttgcagagtaccccatattttcttaatgttggtttcttactgtggttagtatgtgtgcataatttttaagacaatattggatgttatctttaaatttttctgttcttgctgggcatgctatgtgtgtctaatatttgcagtccaaatactgaggcaggaggatggtgaattcaaggctgggatggccttcatgatgagccctgtttataaaaccaaacaaaaaattctaatttttatagtctaattatcacttaaaaggtttttttgctttttatttatccttattttacatttttaaaaaatttatatatttggcatcattttgttatatatgttatgaatttttctgcccacgtgttacccatcttgtacctcattgtataaatagtactttagttatattatttttttaaatattcttttcatttttttcagggtcacccaccaagcctggtgtggcttgcacacacatacttctttagctagtgggtaaatggttactttttagagtctcaaggacattctttgcttagtagtttgaagtaatagcatttggtatgtttaattcacaaatccacattccaaaatcagttcttttgatatttttgtttattctactgcaaaatctctcctttttaaataattgtggctccacagaagtgttgctttgtgagtgggaacatcctcctgaaacgagtctctgagtttcctttgtttctgtgtggtgatattttatctatactgtgctattcagtatcatgtaaattcctgttagtatttttatagatgatatgctaaagtttaggttcacctagtgacagactttatacttctacaatactatacctttttattcataaatgtttccactttaactcatatttctggtggcgttcagtcaagttcaatatatgtcagcccaaacatcttatatattttaggttcattgctggacagtttttacatttatttatttgtgtatgtgtgcatcttgaatatggagttcagaggaaacttgtggatgtcaattctgtctactgtgtgggaaagaggcagtaacaaagtatggctctcattcaccatatattcaacaataatggccaaaataactggccacaaagaattgtataactgcaaaggaccagagagatttgatgacagctgtcctagagcttggcttgcttagttggtcggtagagcatgaaaccttttttttgggttttttgttgttgttgttttgggttttttttttttttttttttttttttttggtttttcgagacagggtttctctgtttagccctggctgtcctggaactcactttgtagaccaggctggcctcgaactcagaaatccacctgcctctgcctcccgagtgctgggattaaaggtgcccagcaagcatgaaactcttgatctcagggttgtgggttcaagccctacattgggctccagttgtaaaattatatgaattatgctcatccccgactagcttcaaataaatgagactcaaactgtgatttcttcattaggcggcacaatgactggggaatcgcccctaacactaggctggctgcctcttcaactgtgctccccaaagttgaatcttcctgggttatttctgctccagcagtctggtgtcctggggagctatttgacttaggtgtgtgccactggtccatcatgaccaatgcagacctcctcttcccgccatcttctcctcctctgttctttctctctcctttttacctgctgagccatcacactggctaagtattcctaaacattgaatttgttactattacagctggaattagatcaacttttcattgtttatcacttgtgtatcagaaggcttttaacgtaagtggatatttgctggtgtgtgttattgtgtacagcgatgcagttcataaaggcattttcatatacagatatttcatgaaccttgacactctgcccatacgccctgccttcccccttcccattgttcttacccatcgccagaaccaatctcagttccacttgcacatcccgcacacacgtgattataatgcacctgtctgtctgagtctgacgactttcctaagatgatggtctgcacttggatctgtttatccgcaagtcgtactgttttattgttcatggctgaggaatgccacatgtcctttattgatttgttgattctatgtcttgacgcttgaatgttgctgtaaacagatgtgtgagtgtttctggcttgttgattcagagtcctttggtgtctagtgatacagctttgcccatgcagaagtttagatctatcctgatctccacaggggctggactaacgcacgttccccccagcggtctatcagggctccagcccctgccgtgtccatcacaccattttgctgctacttgttttcttaatggtagccattctgcctggtgcaaggcagagcaagttttggtggtcgagctggtgcagcacccattagcaagaacgtgccttgatagtggggtggttgccacagaaacttttccactagggatgtaattagcatgtaattttgcagtgtctagtagttaaaaatgagaaggaactggtgaaaataattatgacacttgaagcttatatgttagtgtagaaacaatgtagaaacacgagacattttattcttattttttggtggtttgtggtgtgttcatgtatgcgtgtgtttgtgtttgcgtgtgtgtacatgtgtctctgacagccagaattccaactcaggcatcattcctcgttttcaatctaccttttttttttttttttaaagttgaaatttttatgaggtagggcctatcactggcctggaagtcacaagtaggccaggctgctggacagtgagtcccagagattctcctgtctccctctccccagggttaagactgcaagtgtgtgttaccatgtccagctttctgttctacataagttctcaacatcaaacgtgggtcctcatgtctccaaggcaaacatgttaccaaatagctgttgctgtagcccctgccttttaatgttaagtctttcagattaactgtgtatcttacatctgcagcataatgcagtttagactacacagtgcttgctcagctgtatccaagtagtggctgcagtgttgcgctgtgtgtttgtgagtgttcagccatattgcctaccaacagcaagcccctctacaactttgaaaacatggtttaccttccttgatggtctttggaaggagcccagtgctcagtgacaggaagggggtctgtgcagagtttgcgtcgtctcacctgggagcacgggatttggattttccttcaatcgtgttcatttcctctttaagacatttgctctagagcagctttgtccactaggagtataagtaacagtttacaaggtctagacttgtattttaaaaattaagttaaactggtgaaaataattgtgatgaaaccttaactgcatgtataaaatgacacctcaattcaacatggaaacaatgtgaaatgttagtaagtcactgtgtactctttagtggtcatgggtgtgtgtgtgtatagaatcctcaaataatgaacttgtttttaattaagagcatatttctaagtattaagcataaatgtataggatgcttacgttattggtggcatggtcctaactgtatgttttctttccaagctggtctctggactgtcttcacgctaggcggggcaggcagcaaagcagctgcgtccccagaacttacatctcctctggccaaccagagtctcctgctgctgctggtgctggtgaacctgacggatgccccagacatacccaacccctacaggcaagctgtctcgtcatttaagaacacgcaaggttcgtggtggttttcccttgattgactttcttagcaagtagaggcttgttgtccccattctctccatcggtgtatagtttctgagatgagtgtcagaaaaaattggagtgtgttttctcaggcaggtcaaataaggcttagaggaattctgtggtcctttacgtctattcaatttacttttctttcagagacactccgagtatctgagtttcaatgctagggacattagcttgtgaaacctatatgacaagatgctttaaaattctaaagtctgtattttaggtaaagttttctaggactaagtactgtaacagaaataagcaaaaattttttgggggttgttgtctgtgttgcagcctcctccttgccctgcctatgacgtagggaagcagtgtgggtaactggagggaacagttgtgagtctgccccagtaattgtttcttagtgcaggaaggcgtgtgctgggggtggggaaggggtgcagggctgggcaggcccaggagctgtaactactgcccctaaagcagactgtaaatgggtagtcccatgcggacgtagctgggtgttaggaatcagaagtttgtactctgaaaggcaggatcctatgataggtgcttggatggccagggcaggtccagcactcatgcagtattaagatgagtaagaagtgaagttcttgggtaggattgtgaaggtgtctgagtcctagtaccactctgcttccctgcccgtgctgactgctcacagtcagggcattggggtgccaaggggtcatacctttctcactcttgaaaacaagtgcggagtcctcatccattcgtgctgctgtaatagagcactactactaagactcggtgatttgtaaagaacccagatttatctcttgctgtcctagagtctgggatgctgacgatgagagcctcagtgttcagcgttgctgagctgaggcccagctctgcttctaaggcactgccttgaatgtggattcttgccttgaatgtgggttcttgccttgaatgtggattcttgtgtgggaggcgggatggaaggctcttgctgtggaaagcctgctttatcaaggcctaagccctcacaagggaggagcacgcatgcccaaaccacttcttgaaagtcctgctgctaccgcattggcagctatgattttacatgcacttgggggacatgggcattgaagccatagtgtaagtggggagtcagttcagttcagtggatggaaatgtagacctgggtgtggttttctgttccattactgtcctcagtttcttagtgacagtgttacttgatggctaagaaagctagttttggagctgagctgagctgacctgggttcgcaccacaccctgctcattttagggtgagatctttggcagtttatataatctcaggagccctcaatggtggtgtctgcaatatggatatacaatcgtacaacacttacataaataccaagcaagagtggagtgttaaccacagcgaggacacagcaaggactcactgtatggtgcttacatgtgcaggtaggactgaccccacccgagacctcagaattgaaccgtgtctccgcttatccttttttgagagactcttaagcagcacagaaattctaggtactgacatcagagtcaggtagactataatctctgtctcgggtggtttttaagaaataaaagcttttactgtagtgtagattcaccaccagtcatggctattaccctgagaagtaatgtatcgtagaggtcagtctaggttttctcagggtacttgggaaattttattaaatctttctgaatttctatttcatcatttctaaagttgggcagaataatgcctcagtcattgtacagattaaataagggatactagacatacacgtctgtacagtggctccttcctgtcacttgctggctcagcatgtgtagatcttatggagactctcagaacacatctatgtcaagtatagcataggtcaccactatacttagtaagcactctcctctgctctcattgtaaagaactgctgtgtctagactcttctcctgtgagtcctgtaaaaagtatgtaatatttgtatattgctgtattgcttacttatcttttctctgtgacatacaaatagcaagttatggcaggaagggtttattctagctcatgggtggttcccaggtccagtccattatggcaggaactctggcagcagccgcttgagaggcagtcatattggatctacagtctagtagtagcagcgagtgctggctgcctgtgctcaccttgttgtctcctccctagtgttactgtgcttttatttagtctgggcccccagtccatagaacaggactgtaaggttgttcttcctacttcagctaacctaatctggataatccctcacagacatggtcagctgtgttctcacagtagtcttaatctcatggagactcaccattacaactccatccttgtcagcttgacacctaaatacatgtgtttcccgctgtatcctttcccctttccccattgactcatggccatctcataatgcacaatgcattgagtctccatagtctctaacaatcccaacactattcacaactcaccagagactcaagacagtctctcagctgtgagctcgtgtaaattcaaaaccaagttgcaaactcgcaagacaacataaacccctgtagcaccgttcctggcccctgtgctctttcgtgacacagctggaagatttgaatggctccggccctggcagctgcaggaaatgctgcctgtcttctgggccatctgcactctgaacttggagctttccttaccagacatcctgcagtccttgtctgcccaacaagctgtgatgttctagtttaattctgttgctgtaataaaacactctgaccaaaaacaacaggagaggctcttccaggtcacagtttattactagaaaagtcatgacaggaactggggcaagagccgtgaacccagcattgcacgctagcttgtctctggctcactttcactctcgctcacaccttcctagtgttcttacacttcccaggaccacctgcttcagtatggggccacccacagtgggcggggctttcccagaacagttaattgcaaagacagttccctacagtcatgcagaggccaatttggtctgggcctccgtctccaggtactttactctcagatggctctgagctgcatcaagttgagaattaaagccagttaggccatgggatcccttactgcaccttagattttactgcagcttcatgcagtggcctcccagtcactcccaatcgtgcgtggcctggactctctggaactgagtacaagattccatgaccctgtcagtgggacattcatgtttacaagtgcagcacaatgtggctaggttctgccgccagctcaggccggagcccgggcctcttggactacagtttcatcaggctttgtgctgatgctagggaaacaccccctctctggttgtctctgagcagaggactccttcactagtgttctacgcttagccctcagaactgtcttcctgttgtccaggtggagagcaggcaccaaggtctttaacaattatacgtaatttgtcctctgcactcttgtctgaaacatcaagggactcacatactttcttcctgaaattacatttttccttccctttccctacatctttgctcccaccgtggacctgcatgtgctcacggaagccagaaggtctcgaggagctggacatgcacgtggctgcgagccagctgagcgcagcgaaaggaagcaagcttgggttctccggaagagtggtttgagttttaaacaccaagccttctctccaaccccttaaagtttcttttaaataaaagagttttatggtagttgccttagcttgtgtttcatatgttgatttttctcttattttaaaactaagtcatatgttgatgttttagctatttttcttaaaaagggatcaatagttgtagtcagtgcttcagttgtggcttacagtttgaagtgctgtaaccattatgtatgtgtaaatacacaactcacaaaatacttatgtactttttttatatatttttgtgttgattttctgtatttcagacagcagtccgttcccatcatcaattcctcataccttccagattaactttaacagtttgtacacagccctgtgtgagcagcagacgtctgatcaggcaacgctgctcctgtacacgctgctccaccagaacagcaatgtcaggacgtacgtgctggcccggacggatatggaaaatcttgtaagtatcaagagacacttgccgtgtgtgtctgagacattacagagggatgcgttttctttcccaagaggctcagagtgctcacctggtggccgttcaggtggtgctggggagacagatgagaaatgtccccagactgaggtagaactgagcaagcagcctaggtcttgaatgacagagcctttgtccttgaggtcctgagcagccacctgttgcccagggctccacctgagcaggttctccaagcagcatcctctgtacccaccgaggacagctgtatttcttcatgttccttctagctgatgagggctgtccaccgctctgttggtcatgattgccacacagctctgctgacagtgatgagggtcagggtgactgtcccagctagcttcccgaggctctgtcctcacagcctccaagcctgtgcctctgaatgcagtactgcactgttagtcatttcagggcccctggccagataccacttaaaggttcactcagtgaataaaatcagttccgcagtttgtcttggtcttggtggacagatctcctttaggcagccatggctttccattgaagctaatatttaccatcagagtttcagtaaagggaagggtaagttaccgtgtgcttgagatactgtgacctctcactgcactcactgacacacggtcatttctaaaggagccagcagttggctgacagcaacagaatgccccccttagctctgcagagcaaacaaagcaccactggacatttggtagcttctttattggttttaaatactatgtaagtgctgaagaaacataaaatatgagcatattttatcacagtggcattaagaacaaaaggtgtgatgaactaaaatctgtctccacaccagaaaggagtgggaatcgtggtaaagtccgcatcatgagcagagctgtgattcctggtgggcatggggatcacagagatagttgtgtgtgtgagagagatgaattctggggggattttggcaatgagcaggaagcctggggcatgacttgtgggcttctgtggtgcagatgttggcttgtgagatgagagcacatctgtctccagtttgagaacacacactggtaaaaggctccaacagtgggtcacagccctttgggggtcgggtgattcttccacagggatcacataccaggtatcctgcatgtcaggtatttatgttacaattcataacagaaaaattacagctatgaagtagcaatgaaatcattttatggctggaggaactgttttaaagggtcatgacatgaggagggttgagaaccactggtctacaaggtttcgtttgggagttttaggagcataaagaaggatttcaataatttcctagctcatgtccttatctttacagttctctttctgatatagtaaatattggttgaggctgttacatgtatatattgctgcaagtaggaatttattctgccgatctcatttttaaatagttcacagctcctttattctatagactctgatattcaaaagttgatatttcatctccacatatttctcagatatgttgtatgtagagtttttgtgagaaagaggctagatctgccactcttcagtgtaggccctacctagtggcatattttgtgactccattcatataagacttgaaaatggtgacagccatacagccatagacacagttgtgtctctgatcactaggtgactgttacagtctgtcctagtcagggtgaccattgctgtgatggaacacaatgaccaaaagcaactggggaggaaagggttatttcacttacccttcttggtgacagtccatcacctaaggaagtcaggacaggaactcaaacagggcaagaacctggaggcaggagctgcttattggagggtgcttgctcctcatggtgttttaacttgctttcttgtagaacccaggaccactggccctgggtttgtcccacccaggatggactggtccttcccccatcaatcactaattaagaagatgccctgtaggcttgcctgcagcttcatcttacagaggcattttcttcatcttatgtcatctctgatgactctagcttgtgtcaagataatgtaaaattagccagcacaggtctgtgtctgaaacatcatccaagggcttacagtctaaacatgcagcaacttgttgggggattttcaaactcccatatcctttagggaggaggtgaagcctggctggtagaaagaattagttcccaaggcatgtgctcctgaggcctgtgcccagccctgcttgagatcccaggtttctgttttctggtttgtaccttgtgatatcactgctatggtctccatcatgccatccttactgtgacatgtgagattcctctgaaaccacgagccaagcaaaccgtccctccagcgagctgattcttcccgctgtgttctgttttggtcacagtgacaggaaaataacttggtgagagggaaggaggaagagtgatcagggactgcgagctaaagggcctgaggtgattgaaataatgaaagcaggctaaagttagttggtaatagttgctcagatttgtaaatctaaaaaccatttaatgatacctttctttttttaaaaaatgaagggattgtgcaatatgtaagtttactattccaatacaaatacttaaaaggaagaattgatctgttactttggcatagtcctcttggacccatcatcttaaacttttaatttgtttatttttggaggcaggggttgggagggttgttcgagacagaatttctttgtgtagcctggactgtcctagaactcaattggtagaacagcctggcctcagattcagagatccttctgtctgtctgcttctgcctctgcctgctgggattaaaggctgtgtaccactataccctgtatatagactcttttaactttttttttttttttttttggtttttcaagacagggtttctctgtatagtcttggctgtcctggaactcactttgtagactaggctggcctcaaactcagaaatccacctgcctctgcctcccaagtgctgggatcaaaggcgtgcgccaccaccgcctggccgactcttttaacttttaaaagattttttaaaaacacatctcttcctccatgtgcatgttcgaggttttagatctccaggtcctcttggattgctgcagggtggtgtatcatgggattatttcatcttaaagcctgtagcatactgtcccgggagtcagggtaggagcttagggcaggaggagaggtagaagttttggaagaacttactcactagccttctttccataatttccttagcctgtcttcctcacaggcttgggagccccagccggaggttggcgcttcccacactgagctgagccctcctttgttgatcatcagtcaagagagtgcaccacaggcttcttgcccacaggcctgtcaggggcagcagagtggggaggcattttctcaatcgaggcttcctcttctaaaaggtctctagcgtgtgtcaagttgatataaaactagcctgcacagtctgtatgatagtttcatgcaatttaactattttgcccacatacttttagtgatgtttttttctaattagtgaagaatgaacaaattaactatgtgaaaggagcaattagaaatgaacttgtacatttgtgaacagggtcataagataaggtgtctgatcagagtcaccgacgactgtctcggggcaatgctgggaaaatgcaccatgggctacaacagtctcttatgtgaagcacagttttggattattagcattaaagtgcacgcggtacgaagtgtgcacattaacgtgcattaaaatttattagcagctaagcttttctgagcagctcaattcttttcttccttttttaattagagggagttgatgggacctcttaaaatcaccaaactgagcctaagtggccactggaaactaggttttctttagcaggacatctgtaaaggtgactttcttacctgggaccttagctatgtgtgcagagagtacatgcagccaagtgggtgtctgtcctctttagttatgaaaactgtatagcctaatgcaaaacatgtagaataacagtgtaaagttcttatacggtattgaaatagtataatattttatttcctaggttttaccaattcttgagattttgtatcatgttgaggaaagaaactcacaccatgtctatatggcccttataatcctgttgatccttacagaagacgatggcttcaatcggtccattcatgaagtggtaagtctccgtagctgatgacaggtgcagaacagaggggcttctccacaaagtgcatttacttgccttggggtttcacccactctccttctgctagagtgtctgggaggacttggaatagaaatggtgttttcttccggttcataaaccagtatagtgttctttaccctccttccctgctggacagctgttaaccactgttaaaacttaccagtaataatagataactcattgttcttctcacatgtatattattctcattaggatatgtctattgtacatcatgctgggttacattaggatatttcatatgaaaacacaatatattttgagcttttccctcattgttctcctaggacagttttacctatgaacttgggggtagagggttgggcttccatgacagctacctgtccccactgcgccgtgtcctctgccctgtgctccctttgccacggcctcagcttttgttactgtgttgtaaattccggccattctgacctggacaaggcatagtctctttgttgttttggcttgcatttctctgatgaccagtgaggctggacagtttgtgtgtgtgttagcttttcttagaattatctattcacatcatctgtccatttactaattgcattgtttgattccttgtcatttagtagtttgagttcttcctatattctcaaagtcagtcttctgtgggatgtctggatagcaaaaactttcttcctgtaggccgtttcttcactcagtgatgactttcatgcactgaagttttttgcttcctgagaataggacctttgtcacctgtgattatttcctgagcagctggggtcctgttcagggagtccttgcctattcctgtatgttgaagtattttccttctctctgtttcagagttttacatttgatctatttggacttaatttttttgttcagggtgaaaaattgggatctagttttatttttcaatatccagtttttgcagcaccatttgttgaagaaaccatattttctccagtgtccatttttgatatcttcatgagatatataaatacctatatatcatattctgtaaagttgtcttatttatattattagtgggttggaagaattctttatatatttttgatcttgtgcttttttccattgcagtctgttaatatagtgaaatacactgatgaatcttttcattgctattaaagcagtcctcccattcctgggatgacaccatgattggtcatgatgtgttaatttgtagtatgtatccatatactgtttggttaatctttgagttttgttagctgtgtcctaaggaacttgcatactttttctaagataacctttattgccttggtactctctggcagctctgaacagcagcaggagaacctgggtgtctcttctcactcagatgccgggctcctggagctcctgcctcacctggttgtctgtagaggttttttcctctgttgagaaggttctgcctctcagcaccgactctgacttacttttgcttcctaatcactaagctttgtttgtttttttctgttccttttatctgtgtgctgtgtctatttcatatcattttccatttacatctttgtctgctaatggtatcagtagatttcctcttgatttctggacctcgtcttttctccttcatctatttaagaaaagagaaggaagtccattcatgccatttgcttaggagaactgaagctctcagctcaccttttcatggcataacttaccttcagagcaaaatgaactcacagaaaatggtagacataccctttcccaagggagtcgtttttattcaaacttttcttctttattacagatattaagaaacattacttggtattcagaaagagtcttaactgagatttccctggggagcctcctaattctggtggtaataagaaccatccagtacaatatgaccaggactcgagtaagtatcccatggctatttctctgcctttgtggagtgaagaccatatcataaagctttaatcttatgaaatgcgattatgaaatgcgctagaaaattgaaatttaatctcatagaatgtgctaggaaaatgtggatcagcacttagcatattatattgctgtgtctatcttaatacttagtggctgttcaatgagatacacttggcgcgcaatggaaagcaggcagtgagattggagctgctgcgtgtgcttgctggactccggactctgctttgcccttttaaagcaacaacaaaatacctagagatgagaagaagggaaaatacaaatttagatcaggaagaaggtgcaagaggctgaggctgttgctcgactggcagtgcagctggcacgcaccagctcggctctaatcacagcacgcctgtaatcaaggccatcctcagttgtagaacggcttggcttggcttggtttggtttggtttgatttggtttcagcaggatcttactgtgtagctctggctggcctgtactggctctgtaggccaagctgaccttgactcaggtccaactgcctctacttacctagtgctggggctaaaggcttgtgccgtcatgcccagcatatatagcagatctgagaccagtgtaaataaattacatgagaatctgtcttcaaagaaaaacaagcccctcccccaaagtccaagagagcaaaaaccttgaaaagttggaaaaaaagaaggcaagcaattctgctgacctctggcactttagacttagccaatagaaatgcgttaccacggagagcagcatgcagaactcataggttgtttacttaatatttttaagtatttctgtccgtggggctcgtgtggatagctgtcccagtcgtttttattttgttttatctgagattgtaggaggcggtggctgttttaggagggagaagtccttgtgtgctggggagatggcagcatgcactccctccgttgctgtgtggtgggagggtctggagcagcacaccacagaggcatcactgttcctgctgcagacggcttcagtattcacaccgtggcgatgatcatctggattgttcagttgcatgtccgttgcttccatgggaatttggaaacagtttgacttcttagattgggaactagagaatatagatcctgggtgctcttctggcattagggccgttgggtgtatgttgcttttagttaaccttccttgaagtgtggagaagatgcggtcggtgtgttttaatcttgctctctctccacaggacaagtacctgcacacaaactgcctggcggctttagcaaacatgtcagcgcagttccgctccctccaccagtacgctgcccagaggatcatcaggtaagcacaggcttgaagcagacactgagctttgccttctgggtggtcttttaagacaggtcctatgccagggtcttttctaaacacgtgcaaaaacgacaggttttcctcagattctcactgctttaagaatacccggttctgttttgtttcctaacatagttgttgagcagagttgatggcatttgtatttggtcctttcatgaactagagtgttaggtctcatcttaggttgtttactggctttccagagacatacgcactcaaacgaaacctcaatcactgtgctaaatattttttataaagcaccactctacaccttcatagttttctgtgtttgtctttgaggggtttcacttttaattttggtagggttttgtgcaagtgctgtaccactgaactgccgcctcctaccaaggattccctccgtggctgtttaactttgccacagcagttactcctgttattaacgtaaatttgttctattcccattttgtaagctacaatcataggcctgcagaggtgcatctttcctggaggctcagtgggagggcctgctcgccagatgttagagcgccttgctccttgcttgtgctctctgctaccatcaagagtgggtgggtggttgagtccctgtctgatctcatggctccagactcctttttgtggtactgtcttccacttaaacattgcctaggccctacctcacaaatccagtcagtccccttccagccttaataaccttacagaatcataactgcatgctccttttggccaagtatagtaacatattaacattttctgaggagctatgatttggcctgccctaacatttgtcacccagttctttaaatgtaggaaagttaattatcaactcataactatcacttgcgggcttttcttatgcatataggtatttttattttccagtaggtggctcaatgttgtcttagcagttttcatggaagctgtaattttcttctttaattcttactcttaggacagtgcagaatttctctgacactggtgactggacccgaggctttgctcagcttatacattggtcccactgctgtcaccggcccttgtctctggcccttgggttttattggcatagggtctcaccatgatcccaagctggccttgaatccacccacaatcttcgtgtcttggcttcctgagtcctgtaattgcaggcacgcgccatcacccccagcggcagtcagtttggtgtgtcagactgatactgatcccagctccacttggctcatgtgtgccagtcttatattcgacccatgtgtctgtccatttgctgacctgggcttatttcttgtataatattacttattcattccccagaatatcatgcagtatattttgatcatctttatctctctgacccagctctttccagtttgtcctccatctccctactcggccaacttcacggtctccccctacctttgtaaaagcgtcattgagttcagtttgtgctggccagtgagtgactcctgggcgtggggcctgccctggagtgtggttgacactgtggagtgtgtatcacactgttacctctcctggccagagttcctcagctgggacatgggactttggggactttgtgaccaccttttcttcttctgtgctgggattttatctggcttgagcttgcacaggtcttgcatgttttcataatcatcttgagttcatacatgcatctgcctggttgtatccagaaaaatttggggtttttttgaagtcattcgcctttgactctcaaaattcatctgccccctcttctgtataagatccctgagctggtgtgtgtgtgtgtgtgtgtgtgtgtgtgtgtgtagacatccacttagggctgagcactccaaaggctcttattctctgcacattgatcagttgtgggtctccaggctaattgccatctactgcaagaagaagcttctctggtgagagctgagcagtgcattggtctaaagatgtgcagtaagacattaggagtcgctctaatgctgtatccctttaggggaatgaatggccatagtaggttttcctctaaggccatctatctagccatagccttgttagcggtgtgaggtatgctgacctgggctcaattttggtaactactctgaattaaattctattctttatctgttttcagaattcagtagagactattttacattgactcacaatagaattcatgtctgctctttgtacacgtgactgcagtagggtgggacatagtatgagattgtctggttagctgaccttgtactaacatgagctttatttcttaccaaaaatataattgtctcctcataccctggagtcttcctgctattctgagtagcccttagtttccaagagtgaacttgtacccctggctttattccagcattgggagtttaatggttcctgctgctttgtggtccttttctgtctgtatacatggagttttgcggtggcttcagattggttttcttataatgagtattttctttttctttctttttttttttttaagatttatttattattttatctaagtacactgtagctgtcttcagatacaccagaagagggcatcggatctcattacagatggttgtaagccaccatgtggttgctggaatttgaactcaggacctttggaagaggagtcagtgctcttaatcactgagccatctctccagcccataatgaatattttctaaggcctgtcccatatgcaaattccaaatgaattagttcataacttaagttctggtagtgtgttttagataaagttaaacacaatttcctagatgtaatagttagaaaaacattaccaataaaggcagtatgcccagtttttttgtagtccccaaaatagaaaataaaccaagataaggaatataggttagatgtgtgacgtgggagtgtttagatcctgtgaatggtgcttactttaccatactgggttttcttttagcagtgtgtgaatgagggattgtgttaagtaatgtaaggtatatcagaaccgatgataaggatctcgccctcaaataatttgtaactcagcagcagatgtaaggatctgtccttgtgtgtgtacggtataaagagcttacatagacaggaatgctgtagcagagtagaattcttagcatgggaagaggcggttggtcatagaacggtgagaagacatcacgtgaatagatgaagcagggtgatgacagcagacgttagatactgaagctctggaacacatcagtgacagccaccagggtgagggtagggtcacagtgagaaaggatccacatgagagccagcagtcccagtcccaggagagaaagaggacaggtgaatgacaaggtgaaggacaagagagaatgtgctcaacaaacagtatagacttgtattaacaggtccttatacagaccaccactgtgtgagtacatagcagtgaaaaaaaaaaaaaaacgggaaataaatttacacagttcgttcagttgccatgctgtggacatacacaggtttaaaagcaagaagtaagatgagctggagacttggggaggacctcaaatgttcaacatagcagtgaaggaatgaattgtagatgggactgagacaaagaagctatggcttcatagagtgaccctcattcagtgatcacgtcagaacaggcagattggagccagttcccagtgctgctgctgccgctgctgcctgtctgagctctgtatctgagtggctgctctggacagtgcatccttgtgatgtaggaaggcgctcactctgcaaaactcagcgccatcttcagatgctttgtctgcacagtgaagtctgggtcttgaaaccaagattcattctctaaggaaatgcttagagaatacagttacagctttttgtaactgaagagaactcgttttctaccaaatgtttgtacgtagggttagattgcaaggcatgggaaggactgagaagccatagctgtgcagagtccagggagttggagagccatcctgctaacccttcccagtgagaaacttcatgaatgtattctaaactctcttttaggaaaagtctatacagctttatatatgccagctgtaaaactcagaggagccagtattttatgtgaccttcaacaagatacaagagtcacatgttgctatgatgctatgagaggattttaatgaaacttaaaatctttcttagttggacataaatataagcaacaatttctttgtggtgccccaatttgttcatatttgattaacagtaacgccccccccttacacacacacacacacacannnnnnnnnnnnnnnnnnnncacacacacacacacacacacacacacacacacacacacacacaaattcttagtaccctagagaagtcacagcagatgtgatctgtgttttgattaacagatttacagattcttgagaaagtttgagaggagcatctaattagtgcgcccactgtttgaggtgagtgatttgtctgtacaggagtaggttatgtgtaaggcattatcgggaaaaacaaacaaaagagactgcatgcattgccgtttatttcctgactttaagaatttcctttagcctggcatggtgtcgcacccatttgatcctagtagtcaagagacagacataacatagatctctgtgagttcaaggccagcgtggtctacaaagcaagttccaggacagacagggatgtgtagagagactgtcttagaaaaccaaaaaccaaccaaccaaaactaaaaacaaagaaaagtttcctctgtgtctcgtacccaccagttcctgtttctggcttctacaccacggattaccaggcatttctcttcagtatctcatcctgtcttcatcttttctccaggaagccacctactgtacactcataggtgggaaacacctattgatttgtttatagtcaagatctgtctccattgtactgtcagttcagtgtagtgtaacagaaactagagccaactgtcaagggttgggatatcggctccaaaacttaccagttgtggtgtctccaaaacttaccagttgtggtgtcttggaaaatatctttaactcccctctgtagcatgtccccccaactgtaagatgctgtgacaatagtgactgttagaatcggaattcccggcaggtgtctgactccagcagttgccaccttgccaggtctgtgcattctcctggctccaaagcaagcaaaagtaaaagtgaaaaacagagcaagacggggtttatgaaaatggccgtcctgggaggagagtgagcgttacgctttaatggcggaggttttgggacaaggtgaagtctgcagtcattaaatagttttgcctaagagacatctggttgatctttttctctattgagaattctgcaggcggctcgaaggaagtccttattgcttgaggggacagcccattttccctggttgaggatgttctcagtaggagcaggtgtgtctgcgaggctctgctgtttgcaaatccaagctgacttgcaggtttagcacaatatctgaagacctttgggccctctttgggtctggaagagattgttgtaaagaccaacaataagggtgccttagttaagctgggcatggtggcgcacgcctttaatccaagtactcaagaggcagaggcaggaggatttctgttaattagaggccagcctggtctacagagtgagttccaggacagccagagctacacacagagaaacccaacccagtctcaaaaaacaaaacaaaacaaaaaaaccaaaacaaaattaaaaagctgccttggttacctttctccccatctccactgtagaagagggacgagctggggaagatggtgcggcctttcagactgagtctgcttggatggttaaagtttgcgtgcagagtaaagctggactctgcccagagtttttaagatgaagaagatagcaaaaggaagatgtggatatgaaatttttatcttgctgttagttgccctgcagaccccaagaagggattggtgccatttctaagtctttaattcccccttctgtttgagcagttttccacctcaggaaagtgggtgtcggccgtctggccgtgtgttagagcagtgagtgagaaggtagcaggtcctagtgcttgagacaggcaagggaaacggggccagctgaaacctgagagcagcgtgcatgccgtcggaggcccacggcagcagcatgcagttaaacactgcggcgtttctgaccttctgacatcgcagtgtgacaccgtcacagtcttgacaaatgtgtgatcaacagttttgtgctggtttctcagctgtatgtggcccctgggccacaggttgggcacatctcagaggtcttgtccaaggtacctggtgaaagaaagggctttgctctcagctcttccctatcccttctggcttccattacctttgcaagagatccactttgtaccacaggctatccttgaacttgctgcatggcctgcctgggatgagttgaacctaagtccattctctttcagcctctcaagtgccctggtatcttctgatagtcaatatttccggaaatgatgcaaatggtgatgccattggatgtaggcagaggtttttgatagtagcagtttacttgaatgggtgggtctcagcaagctcctgtgagggactctagagctctagccatcataaacgtgcagtatttaccaaatcccagcagtgcgtgtgatctgactttttcatagagaattcacttgttcttccccaatgcctgggcacagacaggctccagattctgccttgctgtggtctccgatgatcctcgtttgatcttggcagagcactagccaaggaaggaaggagaaatgtttgtcttagaaacctggcttcctgtacttcctgtggcagtggtactttgaaggcagagaagtttttcagggaaatttggcacggcttgcctttcagtttagtcttcttaagaagttacattaggagcatttacagttcccagttggaaatttctaagcttttaattgaactttgtgactgtgtagagagttgctgtatcatacagcagtgtcctggcaggcttggtgggacatgcgaaaacttcataattgatttaaattccagtttagacggctggcacaagcagaatgtttgctttcaaagcaggacagtgcccacttacccgaatctgctttcttgtaagtagagacctctgtggacagccttgccctgtgggaaatgaaccattaaactagcatgcttagagctctgtagactgtaacattgcatggtagaggtgcatggtctgcgacccttagttgtgtattatcaagcacccagtcctgtctcataaggaccagggattttatttttaccctacttttaaaccaaaaggatgacctgtcatagttttgtggcagtctgatgcatcgtctcttttcatatttattataaacgattgtcactaaagcagtaggggtgagtgtcctcatactgtcgtcttgctctccatgcccccagtgcagcttacagaaggtgggtaagagctgcacgtgcagtgtgttgtattctaggactggagccctgagtgtgagactccatggaaaacagtggccctgattcacttctgttactgtgacaggaacaccctgacaagaagcggcttaggagtgaatgggggcctttcgctcagttccagcttacagtctgtcgtggggaagtcaaggcagcaggaattcagcatcgctagtcaggaaggaggaggaaggaggcgtatgccctcttgcttgcacttagctaggtctctctgtcgtcttttaaaataggctttgagcaaaatgtccagcttgacttctaagggaggcatccttgctttgtgtgacagcagactgccccctgccgcagagagagacagacatccatgacaagacagttcacagcagcaggctgctcatggctctgctctttaggggatgcctcccagaaatctttctttgctgtgtatttctgatgctagtggaaaaggctgtcagtgttttatgggaaacttgtcatgtcccctgtggcaccgtggggttccttggtgaaccacccaagaaaagagtgaccctctggctgccattattgtccagagtagtcatttggttgatcccacttggactctctcttacctgtgtatccattggatttacgtcttggaaactgagtggccacatcagtcccttgattcccacccacatggatccttatgaatctctagctcactgttggtgttcagtcttggaagccttaatctaagtgaccnnnnnnnnnnnnnnnnnnnnagagagacagacatccatgacaagacagttcacagcagcaggctgctcatggctctgctctttaggggatgcctccccagaaatctttctttgctgtgtatttctgatgctagtggaaaaggctgtcagtgttttatgggaaactcgtcatgtcccctgtggcgccgtggggttccttggtgaaccacccaagaaaagagtgaccctctggctgccattattgtccagagtagtcatttggttgatcccacttggactctctcttacctgtgtatccattggatttacgtcttggaaactgagtggccacatcagtcccttgattcccacccacatgggtccttatgaatctctagctcactgttggtgttcagtcttggaagccttaatctaagtgaccttgatagatccaggatattttgagtgaaatattatatttggtaaaaattatattgcatcataaaattacagatttttttaaaacctttaacaatcatctctgacaacttttcacagttggcatatggcaatgtggagacttagagttaattatgattaatccacatagacattattgcaggagcagatatagaagtcagtttgttcagctcatgaaccagtcagtattcatataacaaaagaaagaagaaagagctaggctttgcccacgcttattctcgttcattttctctcttcctcactcccgctccctcctactactccctcccttcccctccccatcaatgtattaatgtgctatttgacatgaagcaaattagattcatttttattcctttgtttgtttgtttttccagacagggtttctctgtgtagccctggctgtcctggaactcactctgtagaccaggctggccttgaactcataaagatccacctgcctctcctaagtgctgggccaccacaactgagctacaagccaaggtctgtctgtctgtcttccttccttccttcctttatttttttttaagatttctgttatttatatgaatatactgtagctgtcttcagacacaccagaagagggcgtcggatcccattacagatggttgtgagccaccacgtggttgctgggaattgaactcaggacctctagaagagcaatcggtgctcttaactaatgagccatctctccaaattaagttcttaataaacattttacatatatcgtggactttccaagacaaacatgctaactgaagtgggaaaaacagaagggtaaagagaattaaaatgattatctatccagcgtacgcttgtactgagtcaagagcccctggagagatagagcagacaaggcgggagactgctcccttagaagacctaagagtgtggctggagacagggaactaaggggccattcacaaaacagcaaagtcctgccagggctgcccgaagagaaatgacttaacccacgtaaagcaccttggattgtatcgcctgctggatagtgtcacccagccagcannnnnnnnnnnnnnnnnnnnnnnnncctgctggatagtgtcacccagccagcaatggtagaagtagggaaagccgcccctgttagaggatacctacccatgtctgtctgtggtgactcaaagttgatctgtgcatggatggtaaaacttgtcactctgactgggtgtgtttaaaatctccctgactgtggccagaaggaacccctatgctgtgtggactgccttgtttggcatagttgccagctctcactaggttgctctgtggcagtgggtaccacccaagaaagtgatgtcactctgcctgttactgtgttatgaggaatagtttatagtaaatatctgatatgtcactgagttccttagttgtatgtccattgttcattttccagtgaagaaacacttaaatctcagaagtgacttgtctaaggaaagttaaccgtgctgggatttgaacctatgtctgtgggctacactgccttctattgccaagtgttctttttctgaagacggggtctcactgtgtagctgtgcttggcctggaactctgtatgaagaccaggcctgccttgaactcagagagagctgcctgcctggaggttgttctctgatctccacatgcgtccatgtatgagcatgtatggtttacatgcacgcactagcaagtaagaacttttctttaagggatcgagtcaccctcagctttcttcatccatagtcccgcctcgtcctccctcctgtagattattttgaacacttcctgataggatttcatttatcataaccacactgtgtaaagagaatcagtgcttaggaggactgatttatgatctgatgcctcttcaggtagtagaggatagtaatgtcagtgtgtatcccaccctcatgctgaaggcaagtgtcagccatagctggtctattgagaggctgcctagtgttagtcccagcggggacagctctgtgatgagtgtgactatagctctaagaggtatgcgctgtctgttatcgaggtgaggacatggaggtcagagataactcttaaacttactcaggctcaaatagctcaatgtgtgctggagctctgaaccaagctgagaaagactctgtgtgtgtgtgtgtgtgtgtgtgtgtgtgtgtttgaggcagtatcattggaattgctgtgcagtgtgtgtgtgagtgtgtgtgtgtgtgtgtgtgtgtgaatgagnnnnnnnnnnnnnnnnnnnnatttctgttatttatatgaatatactgtagctgtcttcagacacaccagaagagggcgtcggatcccattacagatggttgtgagccaccacgtggttgctgggaattgaactcaggacctctagaagagcaatcggtgctcttaactaatgagccatctctccaaattaagttcttaataaacattttacatatatcgtggactttccaagacaaacatgctaactgaagtgggaaaaacagaagggtaaagagaattaaaatgattatctatccagcgtacgcttgtactgagtcaagagcccctggagagatagagcagacaaggcgggagactgctcccttagaagacctaagagtgtggctggagacagggaactaaggggccattcacaaaacagcaaagtcctgccagggctgcccgaagagaaatgacttaacccacgtaaagcaccttggattgtatcgcctgctggatagtgtcacccagccagcaatggtagaagtagggaaagccgccctgttagaggatacctaccatgtctgtctgtggtgactcaagttgatctgtgcatggatggtaaaacttgtcactctgactgggtgtgtttaaaatctcctgactgtggccagaaggaacccctatgccatgtggactgccttgtttagcatagttgccatctaccacacattgcaacatgccagctctcactaggttgctctgtggcagtgggtaccacccaagaaagtgatgtcactctgcctgttactgtgttatgaggaatagtttatagtaaatatctgatatgtcactgagttccttagttgtatgtccattgttcattttccagtgaagaaacacttaaatctcagaagtgacttgtctaaggaaagttaaccgtgctgggatttgaacctatgtctgtgggctacactgccttctattgccaagtgttctttttctgaagacggggtctcactgtgtagctgtgcttggcctggaactctgtatgaagaccaggcctgccttgaactcagagagagctgcctgcctggaaggttgttctctgatctccacatgcgtccatgtatgagcatgtatggtttacatgcacgcactagcaagtaagaacttttctttaagggatcgagtcaccctcagctttcttcatccatagtcccgcctcgtcctccctcctgtagattattttgaacacttcctgatnnnnnnnnnnnnnnnnnnnnccgcagagagagacagacatccatgacaagacagttcacagcagcaggctgctcatggctctgctctttaggggatgcctcccagaaatctttctttgctgtgtatttctgatgctagtggaaaaggctgtcagtgttttatgggaaacttgtcatgtcccctgtggcaccgtggggttccttggtgaaccacccaagaaaagagtgaccctctggctgccattattgtccagagtagtcatttggttgatcccacttggactctctcttacctgtgtatccattggatttacgtcttggaaactgagtggccacatcagtcccttgattcccacccacatggatccttatgaatctctagctcactgttggtgttcagtcttggaagccttaatctaagtgaccttgatagatccaggatattttgagtgaaatattatatttggtaaaaattatattgcatcataaaattacagatttttttaaaacctttaaaaatcatctctgacaacttttcacagttggcatatggcagtgtggagacttagagttaattatgattaatccacgtagacattattgcaggagcagatatagaagtcagtttgttcagctcatgaaccagtattcatacaacaaaagaaagaagaaagagctaggccttgcccacgcttattctcgttcattttctctcttcctcactcccgctccctcctactactccctcccttcccctccccatcaatgtattaatgtgctatttggcatgaagcaaattagattcatttttattcctttgtttgtttgtttttcgagacagggtttctctgtcttgtagccttggctgtcctggaattcactctttagaccaggctggccttgaactcataaagaaccacctgcctctcctaagtgctgggccaccacaactgagctacaagccaaggtctgtctgtcttccttccttccttccttccttccttccttcatttttaagatttctgttatttatatgagtatactgtagctgtcttcagacacaccagaagagggcgtcggatcccattacagatggttgtgagccaccacgtggttgctgagaattgaactcttaactaatgagccatctctccaaattaagttcttaataaagcatttttctcactgtattatacatatgtcatggactttccaagacaaacatgctaactgaagagggaaaaacagaagggtaaagagaattaaaatggggtttggggatttagctcagtggtaaagtgcttgcctagcaagcccaaggcactgggttcggtcctcagctccggaaaaaggaaaggaaaaaaaaaaaaagagaattaaaatgattatctatccagtgtatgcatgtactgaatcaagagcccctggagagatagagcagacaaggtgggagactgctcccttagaagacctaagagtgtgtgtggctggagacagggaactaaggggccattcacaaaacagcaaagtcctgccagggctgcccgaagagaaatgacttaacccacgtaaagcaccttggatcgtatcgcctgctggatagtgtcacccagccagcaatggtagaagtagggaaagccaccctgttagaggatgcctaccatgtctgctgtggtgactcaagttgatctgtgcatggatggtaaaacttgtcactctgactgggtgtgtttaaaatctcctgactgtggccagaaggaacccctatgctgtgtggactgccttgtttggcatagttgccagctctcactaggttgctctgtggcagtgggtaccactcaaggaagtgatgtcactctgcctgttactgtgttatgaggaatagtttatagtaaatatctgagatgtcactgagtaccttagttgtatgtccattgttcattttccagtgaagaaacacttaaatctcagaagtgacttgtctaaggaaagttaaccgtgctgggatttgaacctatgtctgtaggctacactgccttctattgccaagtgttctttttctgaagacggggtctcactgtgtagctgtgcttggcctggaactctgtatgaagaccaggcctgccttgaactcagagagagccgcctgcctggaggttgttctctgatctccacatgcatccatgtatgagcatgtatggtttacatgcacgcactaacaagagcttttctttaagggatcgcgtcgccctcagctttcttcatccatagtcccgcctcgtcctccctcctgtagattattttgaacacttcctgataggatttcatttatcataaccacactgtgtaaagagaatcagtgcttaggaggactgatttatgatctgatgcctcttcaggtagtagaggatagtaatgtcagtgtgtatcccaccctcatgctgaaggcaagtgtcagccatagctggtcttttgagaggctgcctagtgttagtcccagcggggacagctctgtgatgagtgtgactatagctctaagaggtatgcgctgtctgttatcgaggtgaggacatggaggtcagagataactcttaaacttactcaggctcaaatagctcagtgtgtgctggagctctgaaccaagctgagaaagactgtgtgtgtgtgtgtgtgagagtgtgagtgtgtgtgtgtgtgtgtgtgtttttgaggcagtatcatattggaattgctgtgcagtcaaggatgactctgacgctctgccctcacctgccaagtggaagggattatgaacatgtaccaccattgagtggatgctcacttcatgggcatggtagtcttgtttgttttgtaattatttcaacagtcttgtttcaagtgtggtctctaggctctagggggcctagaattagacttcttttgccattttcactgtagcaatccttagcaaaactgctaaaaccttagtgtaaacccaccttacactgtagtaggacctagttagtgccttccctctagccttagcctcaatccaccaacaatgtactaagcccaatgccttccctcaggccttagcctaaacccaccaacactgtgccttccctccacacatgcttacagcaagaaaggaaagccattttcacttaaaataatccttgacaagactgtatgaaagatgaattgtaatgaatgttgacttgagtacttgtggtgttcatgttttgtgtgataaaagtttccacagcacatatctgtccactgctctgtttgccttcagagagagcacactagccactggatgggatataattttgacatgagaaaaccagtagcaggcagtggttatgtaaacttggcattttctttaaaatgaattaaatgagctgacttcaaacaggacaaccgtgggtgttggttacaagttaagagctttttttttttttaattgactttgcttcctggtaacgttaccactttgtaatcctagcgatgctggtaatgaatgtagggtttggaacataccgtgtgattaaatatgtcaacatttaggagctctttcgtaaactcagtgaagcaatatttttcatctgactagagagttattctttcatgaactatattatttatgtccacatgaaaagttttcattcttatttaaatgaactaatgcatattttatgttactctcaattttaaaatctgtctgtgaaatttattgataaaaacgcactttggagtcctcagaaatcttgtaagagactaaaggagtcacgtggtggagggagacagttgttctgcagtgtcctctcagaagatggcgtaagtagagtgcacatgagtgtgtgaactctatcatctgaattagttatgtccttacttcctcccatcaatataatcaatacttagctatgcttgcattattcatttttccatttaataaatatttattgagaagatagttatcagggagttggagtagagaggggctatatataacccgtttttattctctggggaactcgtgggctcttacagaaccatcgctggcaaacgtttttaggtttactgtgcaccctgcccttgtatgggcagggatgtgtctgggctgtctgttactgggtactagaacccccgacgacacagtggcctaaatcgggctggcctcgtgagctctctcagtgttggggattgatggctcagctgggtggcgttgcacttgaggtctcgcaggttttctcacagagggtggtggagtgtgaagcacaccgggctggccgagagccacttacagggttgactggaacgccgcagttctctgggtgaccttgccattgaagcatggccatctcagtgcagccagatcctaagcagcgccgtccggggacagcaggaactgtgctttcctgcagcctcagccggtatctgagaccattgtttctagcacatttaccagtcaaagggggccatagggcgcaaatgcagggagacgcagctcgcttgtgactaccgtattaactttggcttcataaattattccccagtgtacctggataatgcatgactttattcttaagtctgggcttaaaataaaattctacgtttctgttcaaactttaaaaaatacaagctgacgccgggcaatagtggcacacacctttaaccccagcactcgggaggcagagacaggtgggtttctgagttcaaggccagcctggtctacagagtgagttccaggacagccaaggctacacagagaaaccctgtctcgaaaaacaaacaaaaaaaaaaaagtacaaggtaatttaaatttaaactgtagtttttgcatttttcttccttgattcatctttaatataaacttttgcctgttagtttctgttgagaaggaaacgctcattatgcaccaaggtgcctttatttacggccagggcataaactgggaatctggagaaggccagggctctgctggctggctgctgcctctggctcatggagaattgccttgaagcctggggtagctgttcagtgtgtcaggtagatgccccaggcttggtgtccttgtggaggagactggagaaggcgctgctgcaatgctccccttggtggcgctgttgcactgcggctgccaaggaagcagctttgggatttcaccttttccagcaagcatttcatttgatgcagtggtggaccggactgtgggctgggcttcagagaactaatcacactcagtactgtctcagaagaaaaaggcaagtacctgattaactaagtccaacacagtttcacagctgcctaagtacccagagcctgcgtatggcctgacttgcctagacacagtgtgctgctgtgctgagaagagctgatttttaaaggcacagtttcctctacatggggagaaaatacaatttacaaacttgactgaggtgtcattttcctgtcgtgttaggcagacctgttgctgggttcagtggctgcggtgtggtgtgtcacattgtagctccatgcctttggcaatgtgtctgtctgtctgtctgtctgtctgtctgtctgtctgtgggctgttgacttcatgctttgcagctctcagtgcactgagagacggagtgcccttgggaagaagggttgggaactgaaggagactgacgggaccattatgtggaaaaggctgcctggggacatggctcagtgggtgaggtgctggccccacaggcctgagggttggagttcagacccctcagcatccacataaatgcctactagatgcagagctcactgtaattccagtacttagaaggcagaattctccagagctaagtggccagccgggctggtttaaatgatgaagtccaggttcagttagaagatcctgtcacagagtaaggagagaaatggaaaagactgggtcagccccagtccacaattcacaaacagaacaccaaagtatagaacaatgtgtgtgtgtgtttgtgtgtgtctgtgtctgtgtgtgttgtaaatatggggagaataatactcatttgtctttacatgcagatactctcgaaggataatgagaagccaaagcaagtggttatggggtgggtagagtgccagactttacactggctgtttctctcctcttcctgtataaactccaggtcattgactgtcactttgctctctgtttgtatcccaagtacccacaacaatgcaagccatataaataataattttagagaaagtgtttgccccaaactagcagttcacagatgtcaaaaccatatatgcatattgcagaaaacatagacaagctggaagctctccatgatgccaacttccaaagcgtcctcactgcagtccctttgtctcctgtgctgggattgaatccagcatccagctcctctctgtgcaagtgctttgccactgaacgctgctcccaactcccacaagtagttaagctaatatcatggtatatgttactctagacaattttctgttcatttaataatgattttaaagtaaaagctagtctatatatatgaagaattttgtaggcaagttccacagtgtatgactcattcatgctccaacgtataaacatggtagtctcaaaatattaactgaggattttattaagagaacaatagcagtggagaggctccaaggcagttcctttttgtaaggagccggagctcagtgctctgctctcaggtcggaggggcatctacgcttcagcaagaagcaggggagagggttgcagtctaaggagagcaggttgaaggtgagggattgctgatccctcaggttgcctggctaaggcatacatgttcacagagggatgtctgcctctgctcacctgtcccacttacggttgtgcctcctgcatgctcatgcccaggacagtgagcacctctgggcaaccactccatgctctcccctatgtgtctccactgttgggtttcaaaaggtttgcatttagaattacccccacctctttttctttcggagttgttgtttatacagagtttcttctatccacatactggtttacttagagtgggacgtaattgatgaaactgaagctcttctgagtaccaatagcgtgactggaaatggccgtctgcatgctttgtcacatatgttgagtgtcttcacagaccaccctggcaggaaagcacgtgctggaagcccttccttcctaatggggttgaagtctcatttgttcaccaggccaggccattgctttcccgagccacatcccagcctccgaagggtttaacattatagttgaattttctagattattcagagtgacccttgagaagccataagacataggagaaatatgattaaattactatagtatttaggattttttaaacacatttaattgtgtgacatggcacatgacatgacagacatgttaaagacaattggggaagtcacttctccctttctactgtgtgacttagggattgaactaaaaatccacaggcttagcagcaagcatatttacctcctgagggtgttttcaggtaaattcttttaaaatgtatctcaggcagctcccaaactcactgtgtagccaaggatgagtgaactgtggtatctctgcctccatcccctaaactctgagattacaaatgtgtagacccaacaggttcatgcatgaagttccatgcagacactgacaaccaaactacattcccagccctgcaagtagtatttaattttagaaatcagctatcttatgttgaacattggatttctttaaacagttgttgcttacaggttataagaagagggtaatgtaaagattctagccttccccctccgtgctgtacatagccctccacactgcacataccccgtccgtgctgcacatagccctccacactgcacatagccctccatgctgcacatagccctccacactgcacatacccctccacactgcacatacccctccacactgcacataactctccatgctgcacatacccctccacactgcacatacccctccacgctgcacacagccttccacactgcacatagccctccacactgcacatagccctccacactgcacataaccctccatgctgcacatagccctccacagtgcacatacccctagatgctcccatctagatttgcagctccatactgcatttatgaagagataagatgcgtgtgatgatttcagggtttaggtattttccaagctacatgtatgtttttctttcacttgaagctgtctctctctccccttctttaccacctgcttatgttttgaggctgtctactacttggccttctggtatcctgtaagtaactgttaaccctgactggtccaaacatgggtagcagcatgatctcatgtcattttttttttaaaaagttcttagaattgggccatagactaaatactaagtttgaagtattaagctcctgtctttaagtgaaaatagactttccgaaaagctaagtgttctcactaaacctttctttaaaaagtgttctcagcttgaagtgatatttttctttagctctgtgtgtgtgtatgtgtgtgttttgtcttttaggtttttgtttttgtttttaaagacaggatctctctattatgtagctctagctgttcctagaacttgctgtgtagaccacgctggccttgaatgccacctgcctcttccttcacgagtgctgggattcgaggagtgtaccgccgtgcccagctccattgtttttagctggtggcgatgacactgtgacatgctggaaggatttcaggtagcatcgtcagggttagaaccatctgtccatgacagaaaagtgaagcaccttaaacaaagagagccatttctttccaggtagaagttctctgaggaggaggttctgccccggtgtccctgtgctggctggtttccgtttgcagctccttcagagtcctcggccccatcagcttatcctggacaagcctttatccccgtcctgaggacagaatggagcttagtgcagtgcatctctctgtcccagactttacaaggctgagatccaaatggtctctgggctcttactggggaggctctgggggaggacctgcttccaagcttgnnnnnnnnnnnnnnnnnnnntagttgaattttctagattattcagagtgacccttgagaagccataagacataggagaaatatgattaaattactatagtatttaggattttttaaacacatttaattgtgtgacatggcacatgacatgacagacatgttaaagacaattggggaagtcacttctccctttctactgtgtgacttagggattgaactaaaaatccacaggcttagcagcaagcatatttacctcctgagggtgttttcaggtaaattcttttaaaatgtatctcaggcagctcccaaactcactgtgtagccaaggatgagtgaactgtggtatctctgcctccatcccctaagctctgagattacaaatgtgtagacccaacaggttcatgcatgaagttccatgcagacactgacaaccaaactacattcccagccctgcaagtagtatttaattttagaaatcagctatcttatgttgaagattggatttctttaaacagttgttgcttacaggttataagaagagggtaatgtaaagattctagccttccccctccgtgctgtacatagccctccacactgcacatagccctccacactgcacatagccctccacactgcacataaccctccacgttgcacacagccttccacactgcacataaccctccatgctgcacatacccctccacactgcacatacccctccatgctgcacatagccctccacactgcacataaccctccatgctgcacatacccctccacactgcacatacccctccacactgcacataaccctccatgctgcacatagccctccacactgcacataaccctccacactgcacatacccctccacgctgcacgcagccttccacactgcacatagccctccacactgcacatagccctccacactgcacatacccctccatgctgcacataaccctccatgctgcacatacccctccacactgcacatacccctccatgctgcacatagccctccacagtgcacatacccctagatgctcccatctagatttgcagctccatactgcacttatgaagagataagatgtgtgtgatgatttcagggtttaggtatttttccaagctacatgtatgtttttctttcacttacttgaagctgtctctctctccccttctttaccacctgcttatgttttgaggctgtctactacttggccttctggtatcctgtaagtaactgttaaccctgactggtccaaacatgggtagcagcatgatctcatgtcattttttttaaaaagttcttagaattgggccatagactaaatactaagtttgaagtattatgctcctgtctttaatttaagtgaaaatagactttctgaaaagctaagtgttctcactaaacctttctttaaaaagtgttctcagcttgaagtgatatttttctttagctctgtgtgtgtgtgtgtgtgttttgtcttttaggtttttgtttttgtttttaaagacagaatctctgtattatatagctctagctgttcctggaacttgctgtgtagaccatgctggccttgaatgccacctgcctcttccttcacgagtgctgggattcgaggagtgtactgctgtgcccagctccgttgtttttagctggtggcgatgacactgtgacatgctggaaggatttcaggtagcattgtcagggttagagccatctgtccatgacagaaaagtgaagcaccttaaacaaagagagccatttctttccaggtagaagttctctgaggaggaggttctgccccggtgaccctgtgctggctggtttccgtttgcagctccttcagagtcctcggccccatcagcttatcctggacaagcctttatccccgtcctgaggacagaatggagcttagtgcagtgcatctctctgtcccagactttacaaggctgaggtccaaatggtctctgggcttttactgggaggctctggggaggacctgcttccaagcttgatcaggttgttgagaaatgtagagctgaggccacccttaccttaagtgctcagcctggtaggccaggggctttgagggctgtcccactcagagcggaccaccagtctgctccttgtggccatggaaagctgggtgtaggtgttcacaggtctcgatcacttcagctattggaggtagcctcccaggcatgtcacaagacgtcagctagtcaggctctgtggctctgaagtttccaaactggactccggacccacaagagctgctcaggcgtttgtgcctcaaatgtgggaggccctctgggggcttcctgtctgttcttcccacactcaggcacagcccttcttggaggcagagtggcaggctgagtatttttaaggcctctgaaggtctctttgctgttcccctgccccattctcaggacactatagctgtgattccagcgcgccagggaaatggatgctgtttcgtctttgtcttggcactactctgtagagggaagtgcaccagactcctgcagaccaccgtcttgcctcagcctgttctgcagtctgaattatatttgttatccctacctccttttttaaaaaatttggtttgaagtattgggaattgaatcttaggtgttatgcatgccaggcaagtactatgccactaaataacactccagtccctggtaactccatttgacttgcaagatatcctttttttttttttttttaacattagaacatgaccctctttgggtagggaacatcctgcctattacagtttcctcagactgaaactctttttagtgaataaaaggcctgttcttatgctttctgtagcatttcagatcaaggcactgggtagagaggagagacaaagactaaaaggtgaaacgaggcactgggtaagctgagggacagtttctagcagcttcgcagagctctcgtaagcacgtgcccgtgcttctgtggcagtggcagccgagaaatagtctttatcccgcagttgcccagctgagaaattctatgagaaaaaagggatccacgcttcgtcagggaacaacaaacagnnnnnnnnnnnnnnnnnnnncgtctttgtcttggcactactctgtagagggaagtgcaccagactcctgcagaccaccgtcttgcctcagcctgttctgcagtctgaattatatttgttatccctacctccttttttaaaaaatttggtttgaagtattgggaattgaatcttaggtgttatgcatgccaggcaagtactatgccactaaataacactccagtccctggtaactccatttgacttgcaagatatccttttttttttttttttaacattagaacatgaccctctttgggtagggaacatcctgcctattacagtttcctcagactgaaactctttttagtgaataaaaggcctgttcttatgctttctgtagcatttcagatcaaggcactgggtagagaggagagacaaagactaaaaggtgaaacgaggcactgggtaagctgagggacagtttctagcagcttcgcagagctctcgtaagcacgtgcccgtctctgtggcagtggcagccgagaaatagtctttatcccgcagttgcccagctgagaaatctatgagaaaaaagggatccacgcttcgtcagggaacaacaaacagcctctgccccgccaggtgcatttatctcactagaatccaagagaccggggccttagtgtcttcgtgagcaattaaaggcccttagggtcacattggagtaaaatcaataaataagcagtgtatgtaacttgacggatgaacaccaagactatccctaaaagagcgcccagccttgatttgtttttttctactgtatatatggcacagtgcttttacagagtaaatctaagtaattatgttttgaatgaatcaaagcgttatcccgtgtggcatcttgactgagatagagctgcagaggactgctttcgttcttgctattgtactgagcctgagctaagcccccaggctgtacccaggctgtgcattttaccatgtgtgcatctttaattcatataatggcttaagattttatctttcacaaggatattttgaaatacagtttaggaattagacattcactttaatccgggagaatgttggtgtggcttgctggagcaaggctgaggtgaggagacagccgcatccagcttaggggccagcaggggaggagattccagctgagtgaaggtcattgaagtgaggtcttaggctcaggcctgtttcaataggtgcagtaaccaaaggaccatcaagctgacatcaaagaatttgagaatgtaaatagaactgattgttatcataaaggaattgcttgttctttatttgatgtcaagaatcttagcttctgggatttttgttttcaacctctgtccctttgcctagcagcaggtgtaaaagcagacatagacactaaccattgggtgcacgctactgtggcccacttcagatctagttagtgcttagttgtgcttggacgttgagattcctctgataagttttcagtcccaggtacgctagtgcagaagcctgcttcagttaggcattccagtgtctgcttatttgatgagagttgattcagattgctgctagctctgaggaaccaggtaaaaatgtactcactcgactctattttgttttgtaaagtgatcaatctggtacctggtgccaatatcagtagctttcatgctaaacaacgtgggatagtgttcactatgaccaccttcacgtgcatacacaacacaaacacaacacacacaatataacgtgcgcacacactgcctactattctgccatccctgtgaaagaacgaggaggacttgggccccaggaaaactgggtaaaagtaaagaggtgccctcctgatcttagggtcacagagctgacctggagtgtggttatctggtgtccttcgtcagaaaccgtggtcttaaagcttgggtttgttgtcctctcctacaaatctctcattttctttattggtgacaatggggatagttagggctctgggacgtcctgctcttctcaggctactttgttagcctttcttctgttgtccaaatcgctatttcactccaattgtatttgtgtgtgtgtgtgtgtgtgtgtgtgtgtgtgttttctcagatggacagacgagtgaatagctaaggggaaaatagaacacacttcttgaaagatgtttcactaaggtcagtcttgggattcactgagtttttctgtggataacattcttagaaaaatagcattctttagtatatttatgaagtctgtgctttttaaaggtagtgttcatttgattaaactctatgttcatttaaaaatatatttgtgagatacaaactttggtctcttatttctgtgtagattattggcctttctgcctggttttgttgtttagtcttatatctgctctgtggaatattatctgttggagggtagaatatggattcttctggagaaagtcttctttattaattataagtcatctatttcagactgccaaacaaagtgtagtgagtgtttgaattaaatatttagtgcctcattgactctttcctgtgacttccattaagaccctgagagagaattcttctttaatcagcctcttgtctgctcggatgtgcaggtgctctgaatgagccgtggtggcattcatagccagggtgtggccaagctttccctcgttcttatgtcagcatagttcccgtggaaggaagctgggaaagttgtgtagttatagtacatagctctgttttgagactcgtgagaatgatctggggatggaaaaagtatgagatgtgagaagtgcacagacattagacggctgggtaccaaagatttttcttcacaggcaaatggctgagcttatgctctgtatcctgagtttcttcctccccatatacagtagtgtattcagctagcagaagatagctctgccatagacaaccattctttgtaattccttttgttgttgttgttttgttttgttcttcgagacagggtttctctgtgtagccctggctgtcctggaactcactttgtagaccaggctgacctcgaactcagaaatccacctgtctctgcctcccaagtgctgggattaaaggcgtgcgccaccacgctcagctcttaattcctttttaatatttagttacttttaatcacatgtacattcgtgagtgcaggtgtcccaaaggtcaaaggccccttggagctagaattagcagtttgctagaagccacctgatgtgggtgctgggaccccaactctggtcttctggaaggccaccacgtattctttaccacatgttcatttccatccctgttactaaatctcaaggatgcttagaatttatcttatttatgagaaaacatttccctcctcggtgtataactgaccagtagagaaaatcatgacctaatatttgccaccacaatcaaaataaggacaaattctgtctcgaagcagccccttgtgctactttttattaggcctttctgccagctcataccgctttctgcctatggccttcctctgccagtgtactggaaatggagtcttgagaaatctgtgctaaccctgttcctgtgtgtctcactcctttttattactgagcagtgttctgttatatggccgtgctgtttatgcattcacccactgaaggacatttgggttgtttccatgtgtgagcaattgtgtatgaagttgccataaatatttacgtagagatttctgtgggaacctaagtttccatctctcttgagtaaatactaggagtggtgtgtgtcagttgagtggcaattgctataactttatatgaaactgctcgatgcatttgcaacgtggctgtagcatttggatccctgtctgtatcccggcacttagtcttgtcttcccacgaacgccattttagaggtctgggtgctaccttgtgacttgatttggcagtgactggtgtcctttctgctgaaggtcagctccagttctcacccccacacagcagcttctctgggccttctctgttagatttgcagaattctttatttcactttcaagtcattttgctatgtatcttacaaatatatttctaccaatatgtgacatgtttctcctagcatcttttaaaaaattacagctagcataccctttcatttcctcctgatacttaactcctcagggcctacagtttttgcctaacctcttgcttgatacagcttgtaccgtcctagattcaccatctttttgacaaataatcaagatacaagttgtcttgcttgtcatttgtacctaggatggttatagtctgaatcttcacctagcctctaactactgagtaaactgttggctaactgatctcatggaccataagaaagtgagggtgagagggaagagtctgaaagctgctaacttcatcacagcaggagctggagactccagtctcctctgctgacctagagcttcctaggacttgctctactcccctggcgcaggtccctagcagaagcatggccttgccttcctgtctgcatttagtcttctctcaggatcttgtccattctctagaactacgcctttcatatgtaaagggcatgttgattattataatgcaccccagttttaaatttgtgagaaatactgtgaattttatgccagaaagtccaaaacaaggcatagaatgggactggtcccagctagcagttagctcaggttggcgaaccgtgagattccctgggccattgtccactctctaggagaaaatggagagcttccgtttgtgtgcctgggtggctcccgtgattgaaccctttgcatttctgcagagtggagagatcgtgtgtttggtcttgtgttttgtttttaaaaggcagctaagacctcagagaggactcacggcagagggttcccattgtcactgattgatggacctttgctccgtgctgaggaaggaggtgattttatggttatggttatgactccaaatcatatcccacccttgctgtggttgtcagaataatataaaggtaattgtgatgcgtgaaactcccataagcaagctaacttggagatggctgagtgtggagtgccggttttgccagttttttcctgtaaatcagtgaacaacatgcctccatcctgtaaatcagtgaacagcgtgctttccttgccaagccctgggccaagaactagggcaacaaaaattaaaactggaatctgccttcatagagcttatgctcgagtgtgtcggaaaggcagtgagcagtacagcacccaagggggagagcacagagatgtgcctgagggccaggggtctcacacagggcaagatggaacaggccactccagggaagcacgggccgaaacccagggcctggggctttaacttccctgtttccggatgcaaggagctgagcctaattttaggaattcaaaaaccaggcccactgtaacatactgggacatcacggcagcagctgggtcctcggagccgttaggcagatgggggtgttgatctggggagatccaggcagtcttctgtctgtctgtctgtctgtctgtctgtctgtctctctctctctctctctctcaaacacacacacacacactatgagtgttgtttccatgatgaccttgttcagtgtggcaggcatgtgtcacagcacctgtctgggtgacagggtcagggatgtggaaactttggtatacatcttcggtgtccatccatgaccacagttttaaaatgactctgagaaggtcctccgttgacaagttgtgagtgtgatttctctccaggagtacttactctgatgttttaaggaccctagtagaatttcaactcctaattagatagtgttttattttgaatatattttgcagcctttcagaagggtgtgacacaaacacctaatgtgtctcaggagagctggttgatttcatggttcctggttatcgcatgtcactgagctaatacttatggcatgtatggtgaagaatcaaaacttaatcttttgaaggaattttacagtagctatgaatccttttgccaagagggagtttgtaaaatacattgactttaaaagtgagcaagccttctgataatcataaaatgcattgcttcgctgttctgtatctttgtaaatgcagtctttccattgtgttcatagagttcctgcccagatattcagtgtggatgggtacctgtggtctgtagagcacttcggaatcaagttcacagtccgtgctgctgttccttcagatctgattccttcagatgacttgtagatgctttagatgtcaaccagacctgttctctggatcgctacttcattaaggagcatgtgcggggtcacgtttcccttccaccccagccctaccgagtccagtttggcttttatgggagtcagcacctcctttgttacaaggaggatcacagtgacattggaaacaagctaatcaaggaatacgcttcagtcagtttctttctgtaatgctccctgcatctgactcaagtgttggaagggagtgtgcagtgagtgtctgctttggtcagttttagacttagctagaagaccacgaggcgagcagacaggaacatgctattagtacattgaagtgcaacttgaaaacatacagcaaactgcgttgctgcaacccatccagcttcgcatgctgcaaggccacattggcggttacagagcaaacgtcgggaacggagagtcatggtatttcttttaaaatggtttctttgtccaatgtcaaaagttttgggttttttaggtttttgttttgttttgtttttgtttttgttttgcttaagcaccatatagaaagaaatgctacccacacctgcaaatacagattggagtatcttaaaaaaaacagacgatggtgtatttcatgacgttcctcctgcttagtcagtatttttaggcacctggcatatgacacttactgactatacatttttttaaatttattttcaaatgtctgatctgctttggcagtatgagaaaaaaatcaatatatacaactattctgtgtctgtgtgtgtgtgtgtgtgtgtgtgtgtgtgtgtgtgtagttttgtaaatgaaactaatcagatcttagactacaagttgaaattctcacattcttagaaacaaatttaagatgtaacacgactaactctgtacctgctcccaggtgtgtgtctgatgtaacaagttctcacagcagtaagctagtaacgacaaaaattactgtctcaatttttctatttttttttagtttctacaaatgttggtttaaggtttttattgctgtgtttacttctgaaataagcggcttaaaataggataaaagtacttaatggaaactttttaattagcacagaattttattaaatatatctataatagtcaaattttagctaacaactttatactataaagttagggctttcttgttttgaatttctttagcaattgagaaaaaagtttgcacaaaaggtattaatattgctgacagttttggggaatgctctttttactggcagtggggtatgtggttacctcatcccttgagctggctcctgattggtacatcagtacatggcctgttcttgggctagtcctccatactaaacagtctctgagcggttcatgctagcaggagttcagctccaggaaaaatggcctgcactgccaaggagtgacgtgattcaaggtgctctccttccactgtggacacttgacattcatcccggattttctgggttttatttgcttggatatgagaattttgaactgtgtaaaaatagtataaaattgtgtgtttcggctattttgtaaattttttggtttgtggaaatctcttgtaaaaacctaatgtatgtttagttcatatacatgaacaaatcagagaggttaaacatatctcagtgagtgacattcaagttgtattttaatgaacgctactttcatattagcaagaagacagttggttactagggacctccatgtggtaggttcctactttctgtgttatggttgataaactctccttagaacaaccatcctcctctttctcctcctcctcctcctcctcctcgttctcttcctccttctcttcctcctcctcccccttctcccccccctcttcctcccctccctccccctctccttcctttctcaccgcctcatccccaaatctttatgagaaaggtgtcatattttagctagcaggttttagagggtaaagaccccagtcagtcagtctcactgggtcagcctctggggaggacttagcagcagcaccctggctgcgtgcaagcatgatgttagagcactcccttgccagggccctgctcactcttactcatgtgaagacatttggagtctcttggaagatgccatcctaaatgaactacataccacccttttaaaactctttaccctcatcttaggaacgagccttcagcacatgagacttgtgacagacgcaggggacccatatccagactgtaccatccatagagagagaacttagacctgtccttggagaagatgtgcttgactgtattaaaacagatagtagggttctctttaaggattttattttttaatttgtgttttatgtgttttggtgtaaaggtgttcaaatgggtgcatgtggctgcccagcacagaggtgtcgtttgcctgcgtctctgaagctagagttaaaagcagtcatgccctaccagatgtgggtgctggggactgcacttggggcctctgcaggagcagcccgtactcctaactcctaagccatcccgccagaccctggtgtgtgtgtgtgtgtgtgtgtgtgtgtgtgtgtgtgtgtgtgtgtgtgtttgtttgtttgtaaaatgtttttttattcctcatcttccttaccactcaaaattctgtagtggttcatcctcctgtctctaaatttaatgtgattgggctggagtggtttcctcctagtgtttatagctgggttttcatccccaggattgcaataaataaatcctaaaagtagaatttttttttacttttttattttatttttatgtgtctgagtgttttggccacttactatgtatgtgtctggtgcctgtggaggccagaagatagtgtcagagcccctggaactggagtcacagatggttctaagccaccatgtaaaccctgggaatcaaggccctgtcctctggaagagcatcagtgtgctctgaagggttgaactatccctccagccctgaagggttgaaccatccctccagcccctaacaaaatacatttgaaataaccttatggggatagcaaatgttagttttctcatcaccatgtcttagtttgggttgctataacaaaatgccatcgagtgtatatctttttttttttttaagatttatttatttattatatgtaagtacactgtagctgtcttcagacactccagaagagggcgtcagatcttgttacagatggttgtgagccaccatgtggttgctgggatttgaactccggaccttcggaagagcagtcgggtgctcttacccactgagccatctcaccagccccgagtgtatatcttataaacagcaaaatgtgtttctcatacttttggattccggaaagtctagggccaaggggagagtggattcattgtcttatgaggaactacttcctgggttttagttagtgggttttggtttttgttttctctctatgtccttacatacaaaaaaaaaccagttctcgagactcttacaaggacattagtcttgtttacgaggctgcactctgatgacttcatctagttccagttactttccaaagacacagcttcctaacactgtttttgtggcagttagaatttcagcacacacacgtcaaggggacctaaggaaatcagagcagtccccatcctagttatggatactacggctttgataagacaccgtaacaaaagcaagttcaaggagaaaggctttatctggttcagtccaaataaacttcatcaaagtccatcattgaaagaggtcaggacaggaactcaaaaagagcaggaacctggaagcaggagatgatgctggggccatggagggtactgcttactggcttgcttctcatggcctgcttagcccagcgatggtcccactcacaatggactgggacttccccatcaacctcttactaagaaaatgccctctccaggattgcctattgccagatcttggggagacattttctcatttgaggtttcctcgtctcagatgactcgagcttgtttcaagatgatataaactagccagcacataccccaacccatcttctttccccactttctggggtgaccatagccactcccaccttcagaactaggcagccatttcttctgggctctacggcatgtgtggtgagtcatacactggataatgtcttgagtcttctcaggttcacttcaaatttcaaaatggaaaccttactttttcctggtctttcttgaccagattttctcattcctgtcttagtaaaataaatggccgtacctttcatgtaatccagaaacccaggactctgttctttaccttttctgtccgtgtccagttcattaccaaaccttggcaataagcatgcctcaaagccatctatcctctgccgtccgaggtctcagcctccacccttcccctgtggactttcctgggtctgctgggaattctccctctgcagtccatgagcagaccgatcacttcaaaggcagagctctgcctgatgcactccatgctgagatcccacctcccccactcctcaaggggagctcccaccatgttcccttttctgtggtctctttgttgtcccttctgttggatgacgatgactcctcctcctcttcctcctcctcctcctcnnnnnnnnnnnnnnnnnnnnccctccctccctaaagctatgtgcatcctttacattttgtctaaatctttacttttacaggaaaaaatgttttgctacctatctggtcagaaaaagtttctcatctgtaacacttgaacataaccatatcaatttttttttccgagatagggtttctctgtgtagccttggctgtcctggaactcactttgtagaccaggctggcctcgaactcagagatctgcctgcctctgcctcccgagtgctgggattaaaggcatgtgccaccacgcccagcaaccatatcaattttattattagtcctaatactggcagcagttccttagtgctatctgatagcaaatgcatgtccactttatacttgattatccaaaatgtcttcattttggttagtctagaacaggaccctcatatgatcctcacacaacatttttatttgtgtcttagatattatgaggtagatgaactacaaatgttcattgtcctactcttttaaaaggaggccactgctttgtaatctagtacagcgtcccttcctttcctgctgcttgctttctaccttctccctgtccttgcttctttcccttctttccctcctcttttgagacagggtctctcacagggacttcacagggcctccttgattaaacaagactggctggccagttgtcactggcttctctgtgctgctccagccctgagatgaaagcccgagccaccatgagccgaggtttctgcttgcagaagaactttacaaactcagctgtttctggagcctctttttgcttgccttaactcagtttcttaactagttaacagacggaccatctcacagactctggattctggatttgtgctcttgcttcttccctcccttttgttccttctcattaatctctcccatgaactgaaaattcatgagacatagtctcctccagaagacagataatcaaattcagttttattcctgttttgtcatacttgaaatacatacaatcacagtgggcatggtgagacttccagcatacacccgatgatggtgtgacacttgagtttagattttacttccctgttactgcctcttctacttagtgacctttgaactactgatttctgcctgtcaggtgagttcctcagttataatattgagcactgaatttctaaggtagaatcccccaacagcactgcttagttggttagctaggattgctgcttatttttttcttttaatattcaatatttaattttcagaaacagatcctgattcctgtcttaactctgaaagaaaccagtatattttcatttggaatttctcatgtttgcttcaccttattatgaatcctaagatttgtatgtgtagtatacatatttcagttacttgataactaatcaatcatattttcatattcatctttgcttgctggaagacgtggcgatttggcagaagcccagtctcctgtggtagtttcttcttttgtttttacattagtaggatgtctcgggcacatgtatgttttatgtctacaaacaatctttcattgaatggttttttttttgtttcggtttggtttggttttggtttttgttgaagtaatagtaaatagtgctatgaagagaaaccatggcacacttagatattatgtttagaagctataatagaatggaaacctatctattatttattttcgtttcttccctagttgctttggcaaggacttctaatcctatgctgagtagaaatgctggaattgggcgtccttccttttgctagacttgggttttcctctgagtgtattgttagcagagggctggctccctttattgtgttggactcttccattcccgctaaatgcctgacctgcaagagtttcaacttaagagaatatttttgataccttttccatgtgtaataaggcaacatgaactgtatggctgtgtccctccattctttgctgtagtgcagcatgttattgatttgcatatgtcgtgccatccttgcattccagagagttcatcaggatgattatcactttaggatactgctcaagttcactgggagtgtttgattggggatttttgcagctgttaatcaagaacattggcgtgtaattttcttttctcatatgtctgtcaaaatattttatatgtgttagggggatgtgttaaacctcctcggaggaagggggagagaacagataatccaggaaaggaagcagaggggaagaaagggagnnnnnnnnnnnnnnnnnnnngggggggaaggagacaaaatggcctgagtgtctaagtcgaacctaccttggtaacatcgttttcctgtaatgttctttaaacatgtaagtaaaaaaataactgcaaaaatgtcactctgaaaacatgttgcaattttattgtcaaagcacagtaaaatatattactaggagacttcactgtagcgttctcttcaaacctttcttttttgcctgttttttttttttttttggcatggtttgcagacttgaatgttgttctaggacagaacattttagaagtgcaggatatcaagtaacatgtcagaactgtgcattgcataatctgggccatgttggtgtaggaaggcatgcggagacttcttgttgtgagacgggtttcatgcgcagcagggcctgatttttttaatgggctgactccagaccacattcgcttatttcccacgctgtagtcctctggttcccaacacttatacagaggtcagaatgacatgtcatggctctagatataaactccatagtctggagcgcctgacacttggcatatgagagatactagtcctctttttttaattaaaaaatacattcatttgatgtcttagtgtttactttttaaaatattttatcttgaaattggactcataaaacattgcaagaattgtataaataatttccattcacatttccccagattttacacacattaacatttaaccactttttcatcattgtgtgtatctcttattttgaaatgtttaataaaacaaaaagcccacccacaaaacctggaatccattctgtgttggctgacagctgcagaacatggggcctgccctgcagtgaggttggtacaccctgtgcaggcattggagaaaccgaggcccctttcccagcaggtgtcagttgccaatagcttctgagtgagtgaggggtgggctttgtacccacttcctgttttccatgctggggtttgtctgggttgaacctgtacaggtcttttgcaagctgcatatgtttcttaaaaataacagcattctcaaaataagaaattcaacactgccagacatggtagctgtagtggctattcctggttgtcaacttgacaatatttggaatgaactacaatccggaattggaaggctcaccagtgacccttatctggaggcttggagatccttatctgtatcttggtttgaagatcttgagccatagtggctatggattccagaagattgaatctccgagtttaaggaacacacctttaatctgggctatgcctttcatctgggattaaagggtgtggtggaacacacctttaatctgggctacaccttctgctggagacaatataaggacattggaagaagggagtctagctcttgctcttgctcctttgcctgcttgctgcgtgagactgagtaactgctagatccttggacttccattcacagctgcgactgaatcattgttgggaattgggctgccaactgtaagtcatcaataaattcctttactatctagagactgtccgtaagttctgtgactctagagaaccctgactaatacactctgtaaaacaggctagctcaaattcagaggtccacctacttctgcgtccttaattctgggattaaaggcttatagtagcacctcatggctaaagtagattttggttttatttcttcgatttggattggttttgagaaagagagtttccctattttacaggtttccctgttccacactttaacctgtagatcagtatgggccctataggtccacatccctctgcctgcagggtgctgggattaaagttatgtgcaacccatcccagctctgctttaattataaaacagatccttagtcaataggcttcactggttaataattagctacttagataaagctagccttgaactcactgagcccaatctacctttgcctnnnnnnnnnnnnnnnnnnnntccttatctgtatcttggtttgaagatcttgagcctagtggctatggcattccagcaagattgaatctccgagtttaaggaacacacctttaatctgggctatgcctttcatctgggattaaaggtgtggtggaacacacctttaatctgggctacaccttctgctggagacaatataaggacattgtaagaagggagtctagctcttgctcttgctccttcgcctgcttgctgcgtgagactgagtaactgctagatccttggacttccattcacagctgcgactgaacaattgttgggaattgggctgccgactgtaagtcaccaataaattcctttactatctagagactatccataagttctgtgactctagagaaccctgactaatacagtagcccacattttaattccagtacctgggaggcagaggcaggcagatctttgtgagtttagggatgcctggtctacatagttagttctggaacagccagggctttgtggagagactcggtctcaaaaagcagaaggagggagggagggagggatagagggacgcaggcaagaagaaatttaacacaaatttcaaaaatatatattgttctgtatgtatgttctaatatttaattgttttcatttgcccacagattctttcccaaaacaaagcaacagaccccacccccccccaaaaaaaaaaaccatgtgtttttgagaggagctagagagatgactcagtggttcagagcatttactcattttgcagaagacctaggcttgagtcccagtacccactggtaactcacaaccttctgtaactctagtttgagggaacctaataccgtcttctgacttgcgggagtcccaggcacatacatgggtacacacacatacatgcaggcaaaacactcatacaatgtacatcattcatacatacatacatacatacatattcatacaatgtaaataaataaatctaaattaaaaaaaaattctcgggctggagagatggctcagtggttaacagcactgactgctcttccagaggtcttgagttcaaatcccagcaaccacatggtggctcgcatccatctgtaatgagattcagtgccctcttctggtgtgtctgaagatagtgaccgtgttctcatataaataaactaagtaaatattttaaaaaatgtattttaaaagattctccttgcccccacagtatgggatccagaacccagagtcacatgctagagttactgggcctctgttttgttctttaatcagaaacagacccttgctgtttgtctcttatggctctcaaaattaaaggacactgaagcatttggatttctgtcttccctcaagagcagattggctctactgaggtcctgtggacactcatgacgctagcttgtcctagtcttggtggtaatgttggcttccaacacttccttaaaatgatagcaagttatatttgataagcatttttttagtattttcttgagttttaattctttaattcttgagtcctggagttcttaataagatcctatacttctttgggcaacttctagactgtcttatcttagatgtgttagcatcttatggcagttttgatggggttcttctgttatcgaatgtgtcctgtcctctgacagtgtggtaacaggactctgtattttgcccccactctctcttcatagtcagcacggtcacacatgtagaagactggtacacagcacagttacacatgtagaagacttcacagcacagttacacatatgtagaagactggcacacaatacttcatacatagtatttggctgcctggtggatggtgggttagttgttaatgaatgagtgatttattgttttcaaacctgtccgtttattagttttatttggggttttgtacattttaaagaaaccttttacccacttggtaactttatatacttttgggtgtagttctttaagatggttttcatagccttaatatcattttttcaatattttattagatattttcttcatttacatttcaaatgctatccctaaaagtcccctatacctgccctgctccccaacccacccactcccacttcttgaccctggcgttcccctgtactggggcatataaagtttgcaataccaaggggcctctcttcccagtgatggctgactaggccatcttctgctacatatgcagctagagacatgagctctgggggggggtactggttagttcatattattgttccacttaattatcattttgtttgcgttgtcagatctgttttgtctatgtgcatgtctgtgtggcatgtgcagagtccagaagagggtgtcagatgccttggaactggagtgacagacagttgtgagctgccactgggtgctaggaattgaacaaggagcctccggaagagcaatcaggctcttaaccactgtgccatctcgccataaacttgctgtgttttagtggcctacaatgtgccaccagtgaaattgttctgacagtaatagtttttatcattcctcttattttgtttttattatattacttcaaaactttaaagggtttcttttttcttttttttttttggagggggggtggtagtggtggtggtctgtattgtttatagaactaggattatagagaccaaatacccagtgttatgagccagcctagaccacacttgtggccacgctagacctggcattttgagagtcctgagtcccagtccttgtcccctttgtctttcacgttgtaatgttgtcgttctcagatgtcactgtgaagaggcgctgtctcctgtttccttgctctaccaggtcgattttattcggctcgctaatgacaccgtgatacgttgaggctttgctttttacttttgttttaaagagaacatttaggattacagtaaaattgaacagaatttatagaggattcccatatacctcctgtccttttcaatcctctctgctgtctacatgctattccagagtggagcacttgatcaacacatgaacccgtgctgacaaagcaccaaagcctgcatagggttaaggctctttgaatttgggcagatgtgtaatgaacagtattcatgatgaagtcttgctgctttgccttttcaacattgccttccctcacaactgtgatctgtttgtagactgtagttgcccttcctagaagttcatctacctgaaatcatagcatatacttatgaattagctttttcctagtaatgtacacttcagttctcctgtgacttcccagtagcccatttctgtctagcaccgagttgcctgtggaaagataccttatgactaaaagtgccgtaagcgtttatgtgttctcagtgcccatgggcacgtttcaaggcacacgatgggtagtgttgtaagagactgctcctctgccttctgaggcagctgtaccattgtggagttccttcaagcagagtgagagtcctgctgccttctgtcctcacccaaatgtagcatctttggttggatagcagttcctctactaagcctgtagtgctacctggtttcaactcgaacttctgtaacaccatgcagtgtagagtactgtctgggtgctcatctgctgtctgtatgtatctttggtgaggtgttcgttcggatctttgcccatttttgctctacccatttgtttcttattcatgctctcttagcgacagctctacccaccagcccgccccagaaccatgcagtggagacgcacagaaggcttggagggtagaaaggatgatttgtttttccaaagaaaaacgtctttcttctgtttctctccttttgcctttgtctttcagttatacctgccgccacttgcggagatatgtttatgtgttggacagattgtattccccccgctctccctgttccgcacgtcagcgttgcttctcggcccccagtgacaatggagaggaactcttgtctctaacttgctctcacattctcagatcctatgcctccaggttattaacctctgctgtccatttactgcatgctgcatgtcgtgtggcctggtaattgcatgctttaatgggacacatatgaattgaaaaaggtgaagtgttatgtttaagatactagcaagtaatcaatccctgcaacgttttcttacaaaggtcttcttaagtttatgtcctgggagaggaggcagctttccaccaggacagacactgtatactctgaattctgctcccttccagatcttttctttgacttgcgtttgttgcggtgctttgtctgatgggtgtctgagctgtgtgctgcttttcttggtgtacagcacacctgagagcccactgcaggactccacccatctcctatggctgcactcagttgaacggccttgactctctaggatggtagaaatgactcctttagactctatggtcattactcatttactactgagaagttaaaaagccaggctgcaccaagttttaggcaagcgtaaattaaacagagagaaggtagatgtgtaaagacgcaggtggggtatctcccaggtcagtgaggatccgcagctgctgaccgtgcatggtgccaaaatggagggcaatataacatgactgcatttcctgtaagtcagaaatgacttgtgcctccatactctagctggagaaggtgatttaaggcagtgtcttcactgccaagcgttttaaaggagaagggaaaactccatggcaaccttaaacacaaaatggcaaacatctgcctctcggttgacctttgcccatgaaggagcatcagaagctctgaactgtacatggtgtctcggtgaaagcactttattagggaaggaaaaccgtgtggctctagtggctggtttttgtagtaaagctcttacagactcatggtgacagtgtgctatagactctttggtggggggagtaaaaacaaaataaaataggctcttcgcttcctaatatctgagaacttagcacacaagccaggtgtaattgcggtgctcaggaggctgcagtcatagaatcgcacgttcaggacgagacagctagctacactatgagacccaatctcccaaacagaaagaatttaccaaagtaaaagccactggcttggttggaggatttggagacagagcttgtctgattgtgcataatggggagagttgctgttcatcattgaacccccaagttgtctgataattgaccttgcttctactgacaaagaagtatatcatgtggcagggctctctgcaaactgatgagatgggtgggggagatgatattaaggaacagatggctctatgattgtagcagccaggatatttgtaaggtaggttaacaggctggccattcaggcaggcactgataatgcagccctgtgttccaaatccacaggcaggtgcttcttgtagtctggaagcagagctccttcttgcttgcgagacataatgattggttacatgaaccttgtcatatatagtcaagctactctcttgaagtcagcagagcttgtgtgtccagcttatctacaaataccttcacagcaacatctagtgttttaaacaagcaaaccccttagccaagctgaacttagaggtaaccatcatactgtattctggttttctttgcatatgctgaatttgtcctatcaccctgcaagcccctgaagtgaatatttaatcttattcatcgtcatcatcttccaccctatggtttatagcacctcgaacatcgctaaccctcactaatatcattggcagcagtgtcctaccctcagccacttgtgaaactgtgtacttgccattgggttacatgtcctgatctgctggagcagagagaaatagacaaaagaaagggaagggagtggaccacccggggaagatactgagggaaggatgaggggcgagaacaaaggggcaagcgggcgggcgggaggagagggagccttgctgtagagcagattgcttcctcagcctgagctctggcagctagctgtctccacgtgcaattcggaatacaattctgggtctactttcaacttccctcactccccaccttcaccttgccgacctctcctccctctcacattttgctttcttctcaagtaaggtttaagatgtcagctactgaagggtattttgatttccactacaaaacctccctgaggttcatgcaggccgatcatgtatctgtaatgaactgccaggcctggtcagcctaggttggtgcctgaggaaacactgtggggtcggaatgcttcctagtgcttggaaacatgttttgactgttgtccaagagtttccacctccctatcccattcctggactggttaccagatgtactgccctgggcctcggggcctgccaggccacgccagtgtgacagctcggggacatggagctcaggcctctcctgcggcaactctcatccccagcctcacccctgcagggtagactagggcaggcctgtggatgagatgcgcgtgtaagagaaggtcctggtcaccctgtcatgccacgctagtttgcaagcggctgacgtcctgtatctgcagtgacacatgctcaagcatagcctagccccagtggtagagccgttcactcaacagtgacactaaaggacggacagagccagagtcggaacagagcagtcacagacactcacagaaccaagtggcactgttgtgtacagcgtgcttcctgtacagttagttcctagagagtgtgatagtgtaagtgtgtgtgtgtgtgtgtgtgtgtgtgtgtgtgtgtgtgttcaagaggaggctaatgcagtctgaaggacatactgctgtgaggactgatggagcacgggcacgtcactgacgtctcttcccagtgtcagagttctgtgaactcagagggaccgcctgggctgttcctcaaggaggagggagggctctgctgctgggctagaaagatgctaggcctgcctgccagtgatccccaccagtccttgccctgtgcttgagagagacacacagatgtgtggagccctcggcacaccggacacctttgggattctgaaaccacgagccctcctctgctcacacaccgtgcgtgggtcctttaagcatcttctactagcgggagtttgtcgagtcttcttgccttcctggtcagggtctgttgggtagcactcgtagaccttggtatccaagaccgagttccttatcgcagttgctgtgctttgctattgtgcctttatttgtggacttatcatttcctgccagagtcaattttttgaaaataggaatgatttggtttgtatataattctcagatcctttccatgaacacatctctctcgataagtatatttgtctgattgtaattgcagggccctgtattatccaaatattctaataacttaatgtgtggtgacagggtctttttagggggaggacatagttcaccaagctttgtgcctcccacatctggaaactcctccactcccaaccctgggaatccttggatcacttttcacgctcccagccctagatgtcacttgtgttgaaactggattgagaatttttagtaactgggaatttgaatgcattgttagtaactacacaaagtaaagttaactatatatgtatgtatgtatgtatgtatgtatgtgtcaaatatataactgtgtactactgtttcagttgcggcagaggcagtgagtcgtcggaggcgttgtatgctgaggttctttgttgtaaggacagttgactttgagttctgctaaattttatggtgcttgattctaaggtgctgagaagaaaacaggaatggtgaaaataatttcttttgtcactttggcttttaaatttggggttcccattaagcatgttaaacaaagtggcattgacttctgtctccaggtagtacgttcttggctatgagcactaatcatgaacttctgggagtcatagaactcttctagactctatcaggaattgtggatgttatgttatgtggcaggaaaaaaacacctctgaatgtagggttttttttttttaatggagctgatgtagtttaaaatttttatgtatagctagaaaacagagcccccacccccaacagtagattagacaagacattagcagcttacttactgtgtaaaagcctgagcaggggtggcagctgtgccccataaacactttacactcagagtccacctgccgtgtcccccagacgcctagagtcttcagcctcatctagagtctgggatagctcactatagagtgtgcacagcacacagtacgagatggaaggaaatggcatcagatggaaattgctgtttttaaggtactctcactcatctgagcagaggttagtcacaagtagccaacctgcgcgaagcacttaaaattgagcctttagcagaatggccatgtgctggggtagaagtaagctgttctgggctcctgaccaccccagtgctgctactgcaggggaaaatcacaggtgcctccccagctatcgatgtttgtggtccaagataagacaggattattggcttaaaaaatcctctgctttggactgtttctttcatagaaaacactaagtaaaaaggaggtaccttctgagaggccctgaggcacaaggtgtgaagtaagaattgatggtaaagcttcattagaacaggtcagagaactcgggtttcagaggccacttacagaggcacatggtgcatctgaggcagtgagcgttgtcttctgtcagagcagaccgacatgggattgctcggggattttgttgtttttctccagacaggtttctcctctaactcactgtgtagcttcaatcctcctgcctcagcctcctttatactgtgcccaggtatatagtattgtatccaggtaagtgtagtgttgtctgaagtatgatgctccaggcttgaagtgcttgcgtttgcttagtttgctcctttggtgtctctttatactgtggtttttaaaaagtcacatctggtgccctttttttctctttcaaatatctacatcttcatctggaatctaagacagtttctaaaaagagtttcctcaaatgagctttctaaaacttctagaccaatcttgtcttagtgtacccctcacaaaatctgtaatgtataataagtatttgaagccatagcaataatttttcatgcatcggatactgtcttaataattctgttgtggccgtatgccttattgatttctgtgccgctggtgtggtatgaaatgaaatgtatcttcccacttaaaccatcatggtttccttttgaattacatcctcggcacttgatcttctcatcaggctgcttacccctgtgctctgagatgctctgctcagccgtgcggactttaccgcttgtgctctgtggaacataaatcaataccagacaagtcagtccacattagaaacgtcagaaagaaaacacagttaagccgttaattgttagaaatcacctaccatagggtgtattctgcttcagtttactgtcttcccctcaagactgactggtgtcctggagacagagtgcagatcctgagacattgggccacgcctgcactggtgctgtggccagatctaggtcttggctcccatgccttttgccatttcttttcaagactttttgttgtaaatgttagaattgcttaaggtctctcttcaggtgttctctactcccctcaccctgctcccacgagacagctgtgtcgtgctgtttgagaggggctggtgcaggccaggctgacctcatggaaactcacttttctagccaaggatgaggttgaactgctgagtctcggccgtcaccttctgcgtgctgggcctggtttatgcagaggtagtcggtgaatccaggcttctccaatgttagcaagtgctctaccaactgagctacggccccagtctcaatagactgttgtcgagggcaagagggtgtgtgtgtgtgagggggtgcatttgggtcttgcatgtgccaggtgagtgctgttttgcttactcagacctatgtctgtgtttagtcactgatcccaggcaccagctgtgagagttggctacttgatagaagaaaccttgtatttgctgagaatgaacgattttaggttcctgaaagttgattcgttttctaatcaccacttcctcaaagattatcttgtctagttatgaaaaggtagttgtcttattgtatcactgtgacatctttagggtgcacctgaggatcagtggatggtcggataatcaatctctctctgtttcttgctctctctctctctcgccctctctctctctctcagagagagaaacagagacagagagatttttaaaagatgaagaaaagccacatgatgagggtcttaagttcttctggaatatgtaagttatgtaagttgcagacttttctccagtaaaagattttacaaattgtccacttattaaggctctggtaagccatggccgtggaggtgatgtcaacacactttgaaagactccttctaaaaacatgtgctctgtagctccaggaagcagaagagcacagagagaaggggaattatcttaaattagctttgtgtcattaaattaaacatagcactaagaaataatttctaaacaggatcacttagggaagaaagggtttactcagcttccacagcactgttcatcatccaaggaagtcaggacaggaacccacacagggcaggaacctggcggcaggagctgatgcagaggccatggagggtgctgctcactgccttgcctcccatggcttactctgtctgctctcccccatcagtccctaattaagaaaatgcctaacaggcttgtgtaaagcctgatcttatggaggcattttctcaattgaggctcactcttctcagatgactccagtttgtgccaagtagacagttacctgtatagtaaggaataaaacataccagtgtatgtgttaaaaacgttaatttatgtacgtgtgcatgtgtgtgcatgtatgttgcgtgcatgcatgtgcgcacctgtgtgtgtgtgtgtgtgtgtgtgtgtgtgagtgagcgtgcatactcatgcatatacatgtagaagccaaaggaagacattgggtgtcttccgttgcttctgttccatccctttagactgggcttctcactgaacctgaggctcgtgctttggctaggctgacctgccagggagatcctgggcctgcctttctcctcccccagtgctcagccttaccagatctctttttcttcttctttttaaatgtgattactggggattcaaactcagacccccatggtggcatagctctcactcttccccactagtcacctccccaatcctgatagaaaagctaagctcacactgtgcacagttagaagtgcttagaaagtgtcttccttacaggaaggttggtaaatttttgtgaacaccaaaattaacaacttggctcaacataaatgttataagggcccatcttggtgatcttaaaaaacaacaacaacaaccagacacccagctttactgtatacaggtgaccatccaaaggggaaaattttggagataaactaattgttaaactatagcaaaaggtgcctattaatgatatacatctttatcccatgggaagaatgaataccctgagcgttatcacccaagggaacagagttaagaaggaagggtatgaagtttccatttgccttttggtttggttttgcactatgtaaatactttatttcacgtcagccagggctccgtcccaggctgcttcataggctctcgatgggctgctggggccagtaccggtacttcttcttgtccagcttggcgtctgggaagatctcattcgagtcatcactggtcagctggtcaaagggaattgtgttcctcgttttctccagctgcttctcacactcctgggtcctgggctgaggtccagacgcaaactcagcacagctcttcacatcccccgtcccctcctgtccaccagggctgtgtgtttatcctcaggcacagagatcttcagggcattatactgcttttcaaaatcatccaccaagccaggcttggccacattggccttgtagaaagcccagtcaatcattggtggtttctcagacagactagccaacctggtgtggagggtctctttccaggactttagggcacttccaattgccttctggttttggggtatgagctccacacaagatacccaatcactggtttttagagcaagtttatgcccagccatcttgagatactccagcagagcgctgtttctccatttgctttttaaaagcagtagtctatcttttatccaccagctgctttttaggtgataatttccttggtcaaggagacaccatagccacagttgatatgttctgtgggtctgtaggtgtggtcagagttcctggacactttctcatgcaatttagactgtgcgtacagacaactggagtgcacatagagctccacatgttggatgctcttcccctgcggctgccatttgcagggaatgtcatgtgcacattcagacacgcagacttgcacaactgcttattagagaaatattcttggttactgagtgtctcacagagttaaacatacaggctttcccatatatggaagaaaagtaattccacccacttgccatgccttggcatgtcatgatgccagcccttcacatttctttgacttcccgagcttaaatagacagtgatgtaaatcagcagttaaagctgcacctaccagcccttggtgactaagccatcacacggctgaagaggaagggagagccacgtcagtttgcctgcacagtggcagtcacattcagtctaaccccagccttctgagttacagtgacaagattatttatttctaggctacaaaagatgaggaagcagagagaatccaggaagttaggatggctgggcagagatccgaaagctggcagtaaaattgcagtcttcctggggtccctgttctgatcagacttccatcttcctgactttacaatgtcacagcattgtaaagatgagcatatctcaccacgcaagtactccatgattctcaacagataacttccagtctcagggttttgagctgggtgaggtcctgcatgtctttaatcccagcactctgcaagcagaggtgggtgggtctctatgagttcaaggccagcctagccccagtcatccaggactacatggtgaaaccctgtctcagaaaataaaaccaaaagagatttaagttttcagctgttacatgtttcactgtttcctgtctgagctgaaatgatatgtagcatgtttccatgtgtgttctcagcttgagcttaaactggcgtgcatttgcatatcacagagagctgtttataagagctagctcattaaaatttaattttaaatgaaccttagctgtaccgtgtggatttttaaaggttgcacgtgatacagtgtgcccatgtgcagtgtcctcattggtaataatgctggtatttcctgatctctccaacaaatgcgactctaatgaacaattattgctttagtcttcaacataactctatgcgatgctaccttatactcctcctgtatgggtaaggcacagagtgatcatagaaactgccgcagtggaggaggcaccgatagaggtggatggctttgccctgcactgtcctggctaccatgcttgtcacagaagtctgaggcaatttcagccaacactgaagccactttcaaaccctgatttattagacattttagccatattgtatctaaagttgaacttgttgtgtacccacttacagttgagtctggatttagactctgtaaacaggaagcgctattttgttctttgaacttctgtgtagcatcctagagccagctgctcaacccagacgcctcctctccagctttgctcagcttcagctccttatgctggactggaggcgtggctggggggggggggggaccaagtctgcctcttaactttccgtagaagcttgaatattttggttctcatagtagagtgagtggttgtgagatactcatattctctatctccctaaccttttccttcctgctccccaccccatagttgctctctcttccagcactggctttttgtttggggttgatcctgttgttccccacccccacccaccactgtgctgggattgaaaccagagcctcacacatgttaggaattgctctcccactgaaccacatcctaggcctctcagatggtttaaccagattttataacataagcatgtatctagacttccaaggtagcccaaaggataagtcctactgttacctactactgggagtcagcaactgaacatgatttggaatggtggctgacaggtctgatttccttgtcattcccctgtttggtgactgagtgactttaagtaaacagacagatgtggctttcctggggatttggtggtgtctttaatgatccccgaaagtccatcctgtacagatagctacaatgatgcttagtgtcatttctgcaaaatgtcagatagtaagagaaaaattagtatattaatctagaatctgaataaagagctgcagaaaaatatatctctacatactcagtttaaaggaaatgaggtctggggaggacttactatcgtttagtttaaaggagatgaggtctggggaggacttactatcgtttagtttaaaggaaatgaggtctggggaggatttactatcgtttagctaagtgtaccaaagcttctggagtttttccttaggatccaccagccatcgtctcagagatagatcatcacagtgcattaaatgctcactgctgtaccgcaaggggccttcgcctgtcctgtggtgcttccacatcttactcagcactgtatcactgaacatacaatgcaggctgtagaagcaatgtgctatgactgtattgaagagaagaactcccgtcttccttagctttaaaatagtctttctgaagagttactttctgtgcctagcaccaagcagcaaatgcaagagatatcccagctaccagattctgtttaacacatgtgtggctgtggcaagaatcatcagcatttcccattgtgtggttgtttagagagatcttacttcatgctcagccttcccttcctcttgtgaatgtagcactgggaagagcgagctgtctgtacccatgaagaccctgtgctcttgctgaactgctctgctgaaactctgcagtccaagctgaaaggcctccactcccagtttcttgccggaatgcacaccggcctatgccctttgtgttgtccagtcttggtctcctactgctctacctgcccacatgctaggtaggtattatgtctaggcttagctcagtgcttcatagaaaatacaggtcattcggtttttaatgtactttggatcaagatgatgagcgcagtctgttactaaagctttttttgatattctttatgttatttagaagtttgcaaagcatctaaacacagacaaaaaaaaaaaaaaaacagacatctgaacccataattctaaaaataaaaaacacggtcttactatatattcccagttggcctggaattcacagtgtagactcaggtgaccttgaactcatgaaggcctgcctgcctcgtgggattatggtgtgtgctgccataccaagtttgggcctgttcttcttctgagcagacagatctgaaaggctcactcccagttctgttgtctgtgtgtcacacctcctccggacaacacgtgcctcctgtaccacgccaccttacttttttgggctaaagagacaaaactggctggaccagacaggactcactcctggatggggaacttgtacatcctgtcttttctcttttccacatggtactttatgtgaggaccattcaatgtggatttcactttcaattccttctacagtcaaatcgatggtagccttgctccatggtagtgcgagtactatcccaaagagcaagacgaactcttgccgtcattgcttacttctgccgtgtttaatgattctgtatccctggagggaaatctgttgagatacaaagtttgctgcttttcatgtatggggacctgtgctcactggagtagtgtgacttgccttcaagaatgaaagtaataagcaagcagtctttgcagtcaaataactttactcatttagaatacatggaagtgtgtcacagtcccccaaaccaaagacataaaatccaccttccccacacatgtgcataatggcacaagtagtgtagttgtcatgcagttgttcataaactggttatcagatggcattttctgaggttgtccaattaggaaaacttttttctgatgccctgtacttatagaaatacaactatttcccagaagtataattacatcccagcctactgatattgttttctttttgtttgtttgtttgtttgtttgtttgtttttgtttgattggttggttggttggttttttttctttttcaaatacttgaagaaagtttacttttcattgttttaaatgtattatttcattaaaaataactttctgaagttttcctgtttcagaaagacaaggaagaaaaattgccacaactttgaggctaactggcctaggtagtgcgttctagggtaatgctacatagcaagaccctttgtcattacaaaataaaaataaaggacttgctagtggaaatgctgaggcttcagttctttataccagaatatggtcctgatgcaaggcactggcttcctgttgtcatcttgctctcccagcttccctctgtagagcatcactgtcctgtctgccagtgagctaagaggcacagaggtgatttttagagttgaacagatgtcgtgacatgagcagggtgacaccaggactctacttcaccaactgccgtgacactcgagtgactccctctgagtgccttcagtgagtgtgatctgtcctttgacagtcaaatggctacctgtgtggctttgtctctctgtcctctttggcagcgtttggatttctgacttttacaagatccctctgcattgtgcatttgtttgatagataaaggtggagtggaaagcttattctctgtcaggttttcaggaactgacattcactctgatatgagagaatatggtagacacagcagtgagttaaagtatttcagatttgagccttaaagagttcatgtgaatggttcagttcgttaatagaacgtgtgcagagacagttgttctcaggtaggctcctgactagtgtggcttttgaacagcaattggaagacgggcactgtaggactagtaagtttgttccaagcgtggggtggtataaaagaaaatacaggcaagagtgggtgagagacacaaaggattcatttaggagaaaagagtggagggatgggacaggacatgggaagaactgagatcagacatggggatagaagagactgcagccatttgaaatggagaaaagggctgtgattcaaatatcgagagccaaagcagggaggtgaggtgggcgccctgccccccaaaagagaataacggacagttttagtatgcttcactgtttaataagaaaggccgtgggagaacaaagggggaagtgagtaataggagatgatcataagagagcaaactatgaaatggagacaggacggatctgcgcgtgagactgtccttgctccagtaggacacgtggcttccccatttcctaattactcgcacatcattaataaagcacaaaggtaagagaaaaatttaagtccttagtatcagaagtgatacattgtgctgaggagacagctgcatgctgttggaacatgcgctggtttgtacaagagcctgggctaaccgtaaagcagtgcaaaggccaaagcaaaaacaaaactgcaagcaggtatcagcagttcaccaggacgttcaggactggccctggtgctgcaggacagaagctggcgtttctgtggtgttgtgaggtcaagtcaggtgccagcgcacatatttgttctgcaaccgagaggcccgtgcaagttagcaagagagatggtgttctagcttcatctctgtggctgtgataaaagtatcccaaacaaaacaaggcatgggaggaaagcggttggttggctccattgcacaggtccaaatacaagtcccttccagcaaggacgtcaaggcaaggacacaagaatgactcgcaccacatccaagttaagagcagagaggaaagaaaggatgcttgctggctgcttgtgccagctgcctttctttactcatacaggtctgggacgagcctagggaatgctgtagcccacagtgggctgggccagttaacaaacaaggcagtccccacagacatacccatagaccaatcagatctagataattcctcagctgagactgattttcctggtgattctatgtcactatttaaaactttgcacagatggggagagtagggaagcctcgcttcctgggcatcggaactcttagcatagtacctgttacatgttaagtatgtaaatgctaatatagttattttcttgattactttaacactgaatgtctacatattggtagctcatgtgccttatttcacacccagtgccatcgagggcatcctcacttctcaaagggagacaggttttcacggtcgtcacgtgacattctcagtcacatgacagataaccgactataattctcgtgttgtaacaagagatccttaagggtgtctccattagcatggcctatttcaaacccagtttctgttctgctcctgacaaatcccatagtcactgtaagagacagcccagtaacttagccatttaattttatattctaaataagaagtgtaaaacttattagctaggagggggtattcttagcatgtaaaaatggagacatgaatttagatcttttaagatttaaataccattcagaagagatttgtgatgttatcagtgggtggatgagcgtatccttctttggccactaacatctgttcctttttcctgcaatgcctcttccctcagtctcggcatacagtatacgtcttcttcgggtctttgcttggatggcacctcctctgtgaggccatcctcaccatcccatccagatccaggccttctttctggctctgtccatctctctgtggctttgcttttataatttcctggactgtggttgtttcagaagcactctggtaattgtctacaattctgagatctgctctaaacaccagccccatggtagagtacagatttcggcttctctcctgcttcagtaaccaatccttagacatgtgagcttttctttagaattggtttgcttgtaaaatagtttattggatggtctcagtgtgggaggagttgtggctgcagccgaaagcccaggctcagctgtcttccatccaaccctggaggaaggcggcccctccccagcagacagagcagtgtgggcaaataatggcaagaaatggaaaaactctgctgttgtttttcccatggaagaggaagtttccactgctggtcttgtgttgacttggaatggaagggagagtgagtctgctttaacagtgtagctccatgtcctagtcagctctagctgcctaacaaataccacagactgagtgatatgcgtgagacaaatctccccacagggctggcgtcccgcagtgggtgctgtcttagagtgcacgcatgtggccggcctagaaaaaagcactctgttgtgtctgctaaggacactgtattagtgacaattccattgctgtgatagaataccatggccaaggcaacttaaagagccgtcactataacttacagtttcagaagggtagcatacataactgtcttagggttgctgttgctgtgatgaaacaccatggccaaagtaacttggggaggaaagagtttattcggcttatgcctccacatcatgttcatcgaaggaagtcagaacaggaactcaagcagggcaggaacttggttgcaggagctcaacctgctttcttatagaactcgggaccaccagcccagggatggcactgcccacaatgagctgggccctccccaccaatcactaattaagaaaatgccctatagacttgtgtatagcatggtcttattgacacaatttctcaactgaggctccctcttctccagtggctctagcttgtgtcaagttgacataaaactgccagcacaataatgatagtgacagagtggcaaccagggcagagagggaggggctggaagtggcaagagaccttctactgttaagacccaccccctcattccttgaagttcagtaaaattcagcaaaattggttctcctctaaacaagctcgtccatggtgtaattctgtatcctggacatgcgagtgtcctattgtgcagattcttatcataaatcagctggtccggcttatagaactgggggggggggcgcacagccaagttaagacacacttataccatgtaaatgtagtattcaacatcatagctgcggtgctcttggaaaacagtttttgcctcgagttgctcttgtaaaatcatctcagctgggctgcagagatggctcagtggttaagagagcactgactgctcttccagaggtcctaagttcaaatcccagcaaccacgtggtggctcataaccatctgtaatgggatctgatgccctcttctggtgtgtctgaagacagctacagtgtagtcatatacggaaaataaataaatctttaagaaaaaaaatcatcttagcctctactctatccttggcttttctggccagagtcagtctgtctgtctgtctgtctctctctctctctttctttctttctttctttctttctttctttctttctttctttctttcctcccttttttcttttcctcccttcctctctctctctctctctctctctctctctctctccctctccctctccctctccctctccctctccctctctctctcttccttccttccttccttccttccttccttcctgagacagtcaattaaaaataagtacaaacttgattccaagcacttctacagtggtgccgtgcctggtgagctggtcctgagcagccgtggagagcaaggctgtaagctgtttcctccatggctcttgtctctgctcctgactcaggatgggctgggattggaacacataaaccaaataaccccctttttcccccaagttgctttttgttcttgtgtttatcccagcagtaggagagaaactgaaagagcctgctttactgtaggccaccctcccttgcttgctgtaagttgacatttgctgtttactgctcagtaatcgagaaggtgcttccttcaactctgttctctgatttaaatgctttcccacaatcccttcccccagaagtaacagctaatcacctccagattcaaagtgaacatagattttaacttcatgttgaataaaaatggtgcatgattgcgataacaatttatctttcattgagaaacaaatgtttctttctcacaaagatagacttgtatattctagctgaataaatatttacttttagtctgaacagattagattttgtaatcccagacagtttgtgtctgtctaaatagtcttcttatcagactagcaataagctaccagttttccaaaaacagactacttgacaaataattacataaaatattacacaaaatattacataaaagcaacttgggatcaaatattatgtaacctatactattggctgatgaaactctatggtgtagcgcatgatacttgctccactgaaaataaagattaaccctctccaccctagtaataaacaaggaattaaaacagatttacgtttgggatcttttgcccaaagctttcatttttctacaatggtgcattagtactgggagagagtgttgtttgctgttagtgtctctctctttttttttaacctctgtaattattagtttattagtatcatccaggactcatgttcagtattcctcctcaaattacattaacaacgcaaatgtaaagaacccaagtcagaattatataacagcactccatcacaaaagcgcgtgaaattacaagaacgctattttatcttttgtttgtttgtttgttttgtttgtttgtttggttggttggttggttgttgttgattttttttaaaagaacactattttaaaacactggcactttaagagaacgataatctcaaaaaacaacccactaaactgtcaaattgttccctaaactaagcagattaaacatgattaatgaatgagtttgggttttataaagaaaaagcaaatggattggacaaatggtactaatatgcaaagtttatcctcttgtatctgattcataaagggacaaaccacagtataggaaaatataccctttattttaaatgtggcataattttaaaagctggctcaagtaattaaaaatacctttaaacagtcaagtttcctgagcaatccatatctagatagaagggcaaaggcgttacagccagcgttcttgtgatagccttcgctgggactaaggtcaacaaatagtacagcagtcttgtattttaagctcacacttttggggatacattctcaggtcttctttagtaggggaaactacaaaatataactgccattacacagtaatggcggttaaaggagagtcctcgtgtaaggattagaaggtacttttccatcagtccttcaaggacagacgttcagattgcttgatcctaatagtcccacggtgtgacaccgttgatcactccttgctttgccaagtaggttatataatatctcttatccagctatcacgatttaggagattcttcaactatggatgaaaatgttaccctaccacaatggcagggcgtgtggacaaaagcgctcttccagctaactagatgaaagataacacagtaataatctatgcgacccaaaatgggcaaagcaaaagactagcttcctctcgagaagaaaactttcagacctatgaaaaggacaacaatactaataaaaaaaaaattatatttacttagaagcattcagaatgtcaacaaaacagccgcaatttttttttcaattacagagtggtattcagttaacagaacaacaattatcttcgtataagctgcatcagagacaactgaagatgaaaaaaataaaaccaaaagggaaaaaacaaaaaactactgtccccatatataactaatttgtgctgtgtaccaacaagaacctgctttaaatttccataccaatttacaacccccagactgtaccaggcaaggttagtggctattgaaaataccaccaggacagggctatctaaagactcatttggtagtgtgttaactatacaaaaaaagacactgtacagtttaaaaacaaatcttacacagccttacatttcaatttttttctttaaaaggagtgagttgtgtacaggggggttaaatgctttatagacaagaaaaaaaacttcgctagaaccaacttattcatcatcatcttcttcatcttcgtttcctcttcctcatcctcttcatcctcctcatcatcttcctcttccttctttttcttgctcttttcaaccttgaccacccccttttttgctgcatcaggttttcctttagctctgtaggcagcaatatccttctcgtacttctccttcagcttgacagccttcttctcatagggctgcttgtctttcgctgcagtgttgatccacatctctcctagtttctttgcaacatcaccaatggataagccaggctgctcgcctttgattttggggcggtactcagaacagaacaagaaggccgaaggaggcctcttgggtgcattggggtccttgaacttctttttggtctcccctttgggcggaatgtaggttttcatttctctttcataacgagccttgccagcctttgccatatcttcaaatttccccttttctttagcagacatggtcttccacctttctgagcacttcttggagaactctgagaagttgacagaagcatccgggtgctacttcttgtgctcctcccggcaagtttgcacaaagaatgcatatgaggacattttgcctctcggcttcttaggatctcctttgcccatgtttagttgattttcctctgcgaggcacagagtcgccctgtgtccgtccggctcacgcttgccctggcgctgtctctatggagctcaatgtactgcaatggctctgttagcatctctcttgatggagagtgaatgtagtaagatgtcccttatctttcctctgaaacagggacagaaatgtgtacattgtagataaaattgtatgtgtgtgcagtacacacatgccatggcacatgtatagaaatctgaagataacatgtgagatgagagtcagtttgcttggtccttctaccatgtggattctgaggatcaaactcataaagctttggtggggatgcctctccccctgagccctgcgatactcttgatggggagttcatgaagtcccagctcttcactggtcattgtttggatggccaccttatcacctgcttttccttctcctcctagttgccttcattactgacaagaacagcaaaatgaccacattctcctacctgacttgaagacattatagggtgaccatggagccaagacaaaaactgtgatatggcttttaattaaatacttgaagcgtattaggagaagtgtaaagtgtttgctatgctgggaaatctccacttgcctccttaaactgggcaccgtccactgttggtctcattcccttgtcagtcataactaggacaggaaacagtccatctggcagatagcatgcttcaggtttttagataacaggtaatacagctcatgcactgtgttgggagtcggggtcaggtgttccatctccgagaatgttgttagtttcatttcattatgtcatctgtccgttcctcagacatgaagcaggagctgctttacacatttaagactgcaaacagagcaaactagtttctttcagtgtgttctaatgagattgcatagcaaatctgccatggctgggatcagccatagctacagagccagcagagggagcccagtacatgggtttatctctgagtcttgaagaagacagagagagagacagagagggctcaacactaagttcacttcttaaaacaggcagttgttttcctgtctacagcataaggtcagcgatgactttgtcttaaggtaaagacatttcttacatctattgatagaagcctatctttataattattgggatttatggtaatgagctgtattttaatctggttttgttttggttggttggttggatttttgtttgttttgatttgaattttatttatttttgtttgctcatttgtttgttttttgagacaagatatctctgtacagacctggctgtcctggaactcattctgtaaactagagtgatccagcctctgcctcgggattaaaggcatgtgcccccccaccacccagctgatcttcattttcttgcatggctcactaattgctaagtgcattttatcaaagactcggagacgtattcagtgtgttgttgccaatgaacgctgctgtttgagtacacaggtgttaaagggcgttttaagtgagagttgtggagaacaaaagtatgctttgctaaagtactaccgtagcggtgttttgaaggcattctgaatagaggcttgctattgcaggctttgagggataatgaggacaaggtctcacactagtgaggttgtttatgggaaacgttaattctgaatttgttctgactccattctccctttgccttccagtcttcccatccccacacattcccatcctgtctttccctctggatttttattttttagaaagttttactgaagacagtacgatgtgagttggaaattgaatgaaactgaacttccaagacttttagttaaggccagaaactgagatgtatagtttcattcaggctttggtggtattttcaggcacggagatcttacttggtggtttgtgtttggtttgcaggctatgggaaagggtctgcttctctatttcacagtgagtcacagccagggtgggtttcctgtgaacttactgtgaatagactcggtttgtgttctcagtgaaaagtatttctaaactttaactcacaggatattttacacatgaatacagtcagaagattttttttttttaagggaaacaaggaccaggaataactagcactgtggccattggtacaagagacattgcagagtaactgaggcaggaggaaaggaaagactgggcatatgtgcccttgaacatctgttcactgaagcaagtatatgtgtgcagagcaagcagaaattacaaactaattacatgcagggtcaaaggaagtcgatataaatatacaagtctttacagatcggagactttttaaaaatagtaatacagctagcagaaattggaaaagaagggatttaggaggccagcaagctaactcagtgagaaaaagccctcgtctagcaagccggcgacctgctccccggagcccaggaagagagaacggaaccagtcccacgagactgtcctctgaccgtcacacatgcacagcggcagatatgtactgtttatatacattatgtgagcaaaccacacacactaattaccaagttttaaactgagaaagaaaagaatttacaagttcaaacctctagttccaaataaaacttccttttcctgtgactctcacaaaggctagtcaagtgccaagcaaagaaatcccagagttctggttaggattcaaaacatctaaatcgtgccttcctgtaagttctgtacctggcataggtgccagtctccgtgctgttccctgctctctctgtgactgccctgggagctcccacagagtgagcactttaggtagcggctccctgaggaaatgtcttcaccttcggacctgcctgagttaccctcagctgccactccgcccatcccaggcatgctgcgaggtaatccctcttctcaggtggattttctcattagctgttatttcagatccaatcactgccatgagttagtgagctgtactataggagctttttgaaaaactggatcggtatgtgacctgctgcctataatggtttctccagatattaagaaaatgtgacagaaaaaaaaaagacaacttaaatcctataacatcagatagtctatttctgttctttgcaagatatatgtttctgatagaggaggggaagtactgtaatgatcagatatctatgctaactgtgcaccatttaaagtcttccaatacagttaagtttatatgaagtagatatatctttcaagtatgtgctacccaagaagtaggtagagatgtaagttagagttgggagtaaagatcatccttgagtttagttattcttgctaaatagcacgtcagcaaatttaatcaaaattaggaaaatttgcctttaaaagtcttttcacattacatctacttaaatatttttctcaccaagttactttaaaattaaaaaccttgaaagaaatgcacaggagtgccttcatgagagacagcaatcactgtcaaagtcactctcagttttggtaatatagttagtggatcatgtattgacagatcttgaatttttacctatttttctcaacaaactttaccagtaataattacagtaattatataacattattttaaaaattattagtcatcattctgctttgcttctgacttgtctatttgagttttagttacctgtagcttggggaaattgaattccagagagagaatttcagcatttcaaaacaaacattgtttagttatatacttgggctgaccatgtcgtgtggttagtgacgtgtgcttggtgtgtcttagcttggttgtgtgttttagagtggagtccatactgagtgctgtaactgccatgggaagtttttgctagaggtgtgtggatagcagtgggactgagttctgcagttgtacttcagggtgtgctgttgggtggggacatcacgtaatgggtattagatatgatgtcattctttgatgagagtttgatgagttactgggtcttccttgtggtgttgactgtggaatggtatattccatcccaatgggtcagatctggtcatggctgtgatgggcacatctgtcgtccatgccctgtgcagaaggaagcacacttggcgagtttctgagtcacctcctaggagcactgagcctttgcagattgttttctgacccccgtgccttcattttaacaactcgtcttagaaattaatttaaaggtgttcgttttctatgtcaccagtttatggtcacgaagacggaaatgagtaggtgggcaacgtactttgtctagcagcccctgtctataccatgtcactgttcttagcaaagatggttgctttattagatatcactttacctcaactgaaaagtgaaataagattttattcttaaggcaggaataccgttgaagtttctctcactggagtatgaaagctagaagaggaccagtcagcaaaagttgtgtggtcacagccaacgtgaagggctcggcactcacaacacgggcatgtctgtgttgcacgtacaaggtctgtggtagcttctaactaggctgtgagcagccttctaaccaaggccacacagatggagagagcaaagcttaggacaagctcctccccctgaatgccacgcccataagaggcaagggccgtcaagagaatgtttccacctccacagacttggttgtgatttctgtcttattaaagatgtttcagtccttccctccttcccacatttactgcagtcatccagcatgcacacacacacactttctctctctctctctctctctctctctctctccccctcagccctctctcttacttttggtctcatctgactgtctttgcaaaccgtgtcagaaccgtgtcttgtcagctttcctggaatgggcaggaaggctttcctgagaagtagcagcagatgctcctggacacagaagagttcttattcctgaacagacggtgttggagcgcagagcagccgctcggacactgcgtgccccagccacttagtgctgggcctgtcatcctccctggaccagccccatagaacagggtgctcactttcttaaacagttcatatagagcagctttacctcagcgctgtgctgaaataaacactgctggtgcctgtgctctacttttagttatttacgtgtgtctgtctgtctgtctgtctgtctgcaggttaatctcagtagctagccttagtgacagttacctgtacccagtgagccatcttgctgtctgggcatcctatttttgaaaacgtaaaacacaacatatgttatgttttatgttttcataagacaaagagttatgcttggtatctcacatcccgttctccttcctaaacacatagagacagattttttcccccctgaaaaaggagtccaggctgctctaagcttgctttgcattttgtgggtattctgtgggagatacgctgggaagaagtgagggtacttcagtgaaatgtgataaggttaggcttggtgtggagtgcatataatcccagcacttgggaggcagaggcaggaggactgctgtaagtttgaggccagcaaagctaagtagtgagacctagtctcataaaacaaaagcccaattgcctttttgctgcccagttttagtttctggtagttctgagattgtggccctgtgctatgaagtggaagttttatttgttttgacttcttcttcttctttttttttttttttaatttgactctttgtggaaattggtgctttctgtcctgaggactttccataaaatagttatttaataatgtccatttttctgttcatgaacacaaaattcttatgttagttagcttgtgtggaccagttcttaggtgttgtttttctgctgcattttctatgtctttagctttttgttgttgttctcaaatttatttctaaccttactattaaactcatcatttctgatactatctttccagctcctaagagttcagtttcgctcttaggtgttgtctgtatgccacctccttacaggcaagtccctcaccgggtgagtaaacgccacagcatttctttcctgtcgggtcagtggtgctctttgggaatcattggcaatgagtttctattgtagacagtagcctgaaagaaccggttggaagtttggtacccttggggcgctgactggctgatgcatcttagggtagcctggctgggctctctgagatcagttctgtagatccattcatcttaatgctgttcagtttccctgatcctaggcggatggtggggttctctgagtccttgaggcagagatcttttcaagtggctcgtgcacacgtacatatgcacacaccagtctctctggtccactgcttgttaaagagtaacaagcatctctttgcttctgccaaatacaggaaggccaggtgtgggcatggaagatctgatggatgtttaacataggaatgttcagtcaggcttgtgtatgggacctgcgcctcccagtcctaattgcctgagttctagagtatacaatcatccacttctcttaatgtccacctattccttgtctccgacttttctcatctgttgccatgatgttaaattcaggtggtatatttacaattcccacatgtatatacctgccttaaacccagactaatcagctgtctccttgaactctctgcttgcctaacaggtgggcatctcaaatatggcatacccacaggggatgtggtcttcttgaagcttctacccaaccaccttcctcgccttgctttttccagaatactctctaaacttacagtctaagagtgaatcattcaggagagagagcagaagtggagtcaccgtaatcataaaaggcttctcctggtaggagacacagttgccatcaacccagatcttagcacattcccgaggtgtacattccatgggctctgttggtagccatgacgattacttcacccactgtggaagtcagtgtggaagtgcctgaaaaacacatagaactgccaggttctcatccggctgcattacacctgagcatataaccaaaggagtgagcagtcagcacactataggcatgcctgcacacctgggtattacaggaccgtccagagtggccaagtgatcggcctaagtatccaccgacaaaggcatggagcgtgtctgcacacaacacaactgctttttcatccctccgggtcccttcccaaaagccttgccagcatttatttctctttctgatgacagtcatgctggttgggctggggtagaatatcagtaccatttgggtttgcattgctctgatggctaagggtgctgaccagttcatgtcacttgcaagaaagcagatgcacttggagatctgaatgttaaaacaaaccagatgcagactctagatttgaaagagagaaaggcatgaaaatggaatgggactatttgggaaaagtaaggaggggccatgaagggctgtgtgaggtgggaggcgtgtgccttgatgagagccatcttcattcctagatactcttttaaaaagaaatctgttttcacatcgattcagtatcctcttagccagtgtactatcaagagaaagaaattttaaaattcaaactatgaattttaaatgtgaacctgtttttttaattctattaagtcctttgctcttggcattggcgtgttttaaaaattctaatgaggggctggaatgatggctcagagctgagaaaccctggctgcccctcacagaagacgcaggtgtcactcccaggacccacacggtagctcacaagtggctgtaactccagttctggattcatgactctacatggacaggtgtgcttgacacacagacaggcaagccactcataagcataaaataaaaataagcgtttttaaaagtctatggaatctacaaaaagtgtatactacaggttcaatgtgggggtgaggaggtgttagtgtaaactattgttaaacagcaaacctaagcagagtgatcatctgtctcttggaaattgagagctttggtcacagttcatgaccctgaagtcatgaacacatgtagtatggtgttaatcagagtttattcattgtttaccagtaccagcgattgatgataagatttccatgcatataacaaagaagccaaaataatccaaagtcttttttttttttttttttttttgacaaagaaagcagaacttggaggactcccctgcctgcttgcaggtttactgtagagccagagtcaggacagtgtggtgttagtgtacagggggcttccagagcagtgggctggagctcagggataggctggcgcatatgtagccaatgcatttcagccagggccagaaggtagttcttggggaagtgatagtctttcagtgctgaagcaattaactgtctctattctcctaccctgcagaacagacagactttgactcttgcttcagagtacacccagcagtgcaaatacatcatagacctaaacacaagagtagaaatgcaaagcttacaggagaagccaaaggagaaaagctttgggggcgggggtttacagtttgtttgtttgtttgtttgtttaaagacaagacataaaaagtacaaaccattctttttagagtttagcaaattcatcatacttaatcaaattttaaaattaagatagttgtggtagtgtattccaatgtttgggagcagaggcaggcaggtctctcagagtaccatgtcagcctgatctacagagttccaggatagccagagttatgtaatgagaccctaactcgaggggaaaaaattcttataaagatatatgcatgtgtgtgtgtgtgtgtataatgtgcgtgtacatatatgtgtgtgtatatatatttatatttatatactatgtatctgataaagggcttatacccagagcacatagagaaacaaacctcttacaacttaaaaagaaaagcagctcagtttttatgggcagaaggttgtatagccgactacagggaaggtgctcttcagcgcccagaataccaaaactaaggagactgaataccaaatgtcatgaaggaattggtggctcagcagagttagaaagggccaggcagtccagcgacccctgcaggactctactcaagagacagggcaatacgtattctgcaaaagaagaatagccagtctgttagtctatgtctttttttgttgttaaagttggcattctgttcttgtggctgtcttctacctggagggcatcatcctgagtgaggtaacacattcacaaaggaactcacacaatatttactcactgataagtggatattagccccaaacctaggataccctatatataagatacaatttgctaaacacatgaaactcaagaagaatgaagactgaaatgtggacactatgcccctccttagaagtgggaacaaaacacccatggaaggagttacagagacaaagtttggagctgagatgaaaggatggaccatgtagagactgccatatccagggaaccaccccataatcagcatccaaacgctgacaccattgcataccctagcaagattttatcgaaaggacccagatgtagctgtctcttgtgagactatgctggggcctagcaaacacagaagtggatgctcacagtcagctaatggatggatcacagggcccccaatggaggagctagagaaagtacccaaggagctaaagggatatgcaaccctataggtggaacaacattatgaactaaccagtaccccggagctcttgactctagctgcatatgtatcaaaagatggcctagtcggccatcactggaaagagaggcccattggacacgcaaactttatatgccccagtacaggggaacgccagggccaaaaagggggagtgggtgnnnnnnnnnnnnnnnnnnnnnnnnnnnnnnnnnnnnnnnnnnnnnnnnnnnnnnnnnnnnnnnnnnnnnnnnnnnnnnnnnnnnnnnnnnnnnnnnnnnnnnnnnnnnnnnnnnnnnnnnnnnnnnnnnnnnnnnnnnnnnnnnnnnnnnnnnnnnnnnnnnnnnnnnnnnnnnnnnnnnnnnnnnnnnnnnnnnnnnnnnnnnnnnnnnnnnnnnnnnnnnnnnnnnnnnnnnnnnnnnnnnnnnnnnnnnnnnnnnnnnnnnnnnnnnnnnnnnnnnnnnnnnnnnnnnnnnnnnnnnnnnnnnnnnnnnnnnnnnnnnnnnnnnnnnncattggaaatgtaaatgagctaaatacctaataaaaaatggaaaaaatggaaaaaaaaaaaaaaaaagaagaagaagaagaatagctcgaccctggaagcaagtagggagtaggaaacttgaggtctgtccatctaggagactcttgggcattacggcgggatgaattatgagagctcagaccatggacagatttgcaaagcactgtgctgagtgagaaaggcagactcggggccagcatatggtctggtctattcgtgtgagagtctaggagaggcaaaagcagtatccatagttgctagccggaagctgggtacgttgcagaaagagcccagctgtgaaaggccccatggagctttctggagaagtagcactgttatgtctcttgattattctgatgggtaatgtgcatggttatgtttttcaaaatccttgtgttataataataaagctatttgaaagcgaggtaggacataagtgcagatttgagtaccctgtgagcagaagaggaatgtttgtcagaggcagggagggagacatcccttccagaggggtgggaaggctggtgctggagctacgccttagggcatgcatagacctctgccaccctgctcctgcctcttattcccactgtaagtgagaaggccaatgttggtttcttccttagagcaagcccaccgtcttggttgcatttttacccatttgacaccctttcacgtccctgcaatgatgaagtgaagcgggcagctgcctttgcttgcttgtggttttactcttagctgttctcagagctctgtcctgagtgtcattgctcacatagcgttcatgcactgtcatgtgggtgatcacctccacttctgggcttgctcctggtgtaggttgtccccacctctccccacaccaattcccctcactgtcttttgaacactaccatctgtttttttctgcctccagtggtcttcctgagcagcttgcctgaggagctgggggttttgggaggggcatcctggcagaattgttaggcatacagattcaggaaccaacatgcccgtgcttgactcctgactcttactgctcactgctatgtacctagggagacgacttaacctacccttgcttccatgtgtcatccctttaaaaatggagggaggggacatgggtcgcagtcaggcccacctttcccactctgtgatgggtggtgctggtacagggcctgcactgcccctcccacgtctgctgcccttgctaatttctttttcctcccaagtctccctgttcataactattcatcagccagggatctctggaaagccccaattacctgggctcctttctttcagtctctgcgttgtctttgccttccacatggctcctgtcagcttccactccagtctccctcttacgaagttgcatgttcccttagggttggccatttctgcttctgttctcttgtctttcccctccaggggaaaggaatctttctaaggtgacagaggttaatgattccttggtcagtcagtggttttcaggtttccattctgtatcatgggatttcacgacggggacactggccaccataaaggggaaggggacgcataagggaaagctgctgcccactcactaccagacacagttcttcacttccgtctcttactatagtcctgctggcatggacatctctaggtctcagggtgagatccacgctctgtgttcaatcataagaggttgacacacacccagcactttccacggtgggctctgctgcctctgccctattgctggcttctccaccttcactaggatttctttgtttgccatcctgctgcctggcttgcgaggccagctcttagttgttaggttgttaaggcagcagtcagacatccccctttcctgttctcccttgctgctgccctcgctagcttcctctcttgccccatctcaccccatagattttctccagtctcgctctgtaagctgcacggcctctcagtataccttctgtatcctgtttcagcctttcagatctctttatccccattgacttcccagttagccaactgctcacttgaaggctacagccaagcccgatttcctctgcggaatgtacctaaccttccgctgctgcgcccctagagcattctggcagagtgttctctgctttcaaaacttaccccttggacttgacctctttgggcgggaaccacgtctctgagcattgtgcagtagctcctcaactgcctagaacaaagcccagggtattgtgtgtgccatgggcgtcccttcacagtctatcttcagactgtcttcattctggtcgcctctcctgccatctgtgcacctcagctgcagccatttgcaccagcttgggatcttctcagcacacccccgtttggactgaccccgcacagcttttatttacatgctgcctaaccagtgcagtgctgtctcttggcaggggctctggttttctcgggatggtatattccttcttataagacctcttttaagtgtatagtgttccagcccctccacccgaagagcatagtaatcccctctgtacgcatccagtgttaccagaagaatgtgtgtgtgtgtgtgtgtgtgtgcgcgcgcgcacatgcacactcggcatgtgtgatgagagagaagagagacctgtgttttagtcatttccagtttctcaccgaatggccagtttatgatggatattgttatacttaaggaaaagctaatctttctctagctttaaaagggcacctctggtgttaggcccctctgactgcacacgagtcaccgaggatcagcctctgggattccctttgtgatcggcttttccttcgcgtgtagccatcctgcatctcctctgctttacctagcatggagccgaggctgagcccttggcgcgcagagcttaaacagaagttacttttcgcactctgcaatttgcaagtcattctcctataaatttaggtcattttgccttaaaaatgctaaatgaaaaccaaaattagaatgttaaaaaaagcgcacacaagattttgcaagcagtagctctagtgtgggggggagcctgttaaatcataagagaataacaactttgagtgagtgtgaattctgtgtctcattcatgatagaactggaagagacctcacgttatctgttcttgcatgaactttcttaaagctggaaaccataagcacagcttcttggggaagtatgtgtgcttctggactcggtaccctcagccagtagaccttccctcgtgctcaacggaagcaccttctgttgggattgcagctcattcccttgtttggtctcctaacaagggaaacagattgctagtattctcttgtaaagtaaacaaacaaactggcctatcgtttccaaaggaaaccatttcaagtgattttccacagagcgaagaggatgcgaattcggacatgcactggtttgtaagctgagagagcagccctgcattcctgagctgcaacttcaacaagaaagcatgctttcttcctcttgacccctcctcttgcaccaagctcctctaaggcctctccattgttgttccctttaggggtgtcaagtttatgcctctgagctgtgccatgcttgttgtgtgctagaattgactgtcacacttcttttagtctcaataaccccgggctgggaagatgggtcagtcagtggtgtggttgccttgcaagagcaggaaccacattaaagagccaagaatgttagttaaaatttaaggctgggagtgcagtcctgtggtagaatgattacctagcatgcataagtctctggttttaatgccaagtactcagaccatagagaagaacataggagagggaaatctaaaagtgaaaagcagtttaagactagcttagtagtggaacatgtgtccagtctatgtggacctttaggtcaatccccagtgttgccaaaaacaaaaatgaaaaaggatagacaaaaaaagtccttgctgagacgaaaggatggacagagactgccatacccggggatccatcccataatcagcctccaaacgctgacaccattgcatacactagcaagattttgctgaaaggactcagatatagctgtctcttgtgagactatgctggggcctagcaaacacataagtggatgctcacagtcagctattggatggatcacagggcccccaatggaggagctagagaaattacccaaggatctaaagagatctgcaaccctgtaggtggaacaacaatatgaactaaccagtaccccctggagctcgtgtctctagctgcatatgtatcagaagagggcctagtcggccatcactggaaagagaggcccattggtcttgcaaactttatatgactcagtacaggggaacgccggggccaagaaatgggagtgggtggataggggagtgggggggggggctatgggggacttttgggatagctttggaaatgtaaatgaagaaaatacctaataaatttttttaaaaagtcctcatctataaagaatgtttattggtctcagcttcttgagttatcccgctttatccatctgaaataataagggcctttccaaaattgatattcaaatcaacattctatttataagatcatcactaaggaataataaaaccatagttttagcatttaaaaaatactacagatcatcccttgagttgagatggaaagtctatagaaccagaatgcctttgtcctaagcgttcctctaacccgagagtgtgtgttcacaggcgacagtaggtttactgttagggcataggactacacacatttactactagagcatatatgtgtacgcataaaattctctctgtggtcctagtgctagacatacacattttgaatcatgtcttcttaatgaattgactttcactgctacaaaatctttctcttcatctctaatagtaatgctcttctcattcagtcttctctgtctgtagctaagatggccacccaactttcttagttataaactcctatctgtttttagatttgtaagtgtttcttttaaatagctcatagttgggtcttgacatttatctagtcctaaaaaaaaaaaaaagtaaagaagagaagagaacaggaaaaaaaagcactgtcatttgattggagcatttaacacatttatgtttaattttaatcacctttattctttgaaaatctttcacatatctttattaagatagatgcctcttaggtcatagaatccctattctgaacttttcctaactgaccattcaagacctcacctgccacctggaacagggatttttctctgccggcccactggatcatctgtagttctcactctactatacgtttcacttatataaatctgttcactgtgtagcccctccacagttctctgtacgtgttatggctcttgctctcacgggtacagctcagtgcttgtccaggcactcagatttctagacctttcttgcagtttcttccctctcacgtagaactcttcacgttcaggtgatggctttcccaaattctcatctgtcttcccagtgggtcagtgtgccctgcttcttctgtcctacttttctgaactgtagtctaggttagaccattccttagagagaacctcgccattgctgactgttcatgtttgtctcactttaggaatcctaatcttatatttcataagtctcttctatgttttacttgattactacagggaagttcatctgttaccaattagcctgtcatgaccagaagttagttgtgtgtgtgtgtgtgtgtgtgtgtgtgtgtgtgtgtgtgtgtgtgaatatatccttaaaatcacccttgctccaaattaattagttaattaattaaaaataaaatcacctttcttgagaaatgtcttcttgcatacctgtggtcctgtaacactggagaactaggctgggcaacacacttccttgaagagtaggcagcgaagggccacctacctaagcatccagaggggcttacaccaagtctgtcatctgctagtccacttcctgtcctagattttctcctctctgttgttttttcactgtactgatcttttgagaatttttcccgtgtttaagatctaactttagcctgggaagctttccagtgagacccttcttatttaaccaccccacccccgcccccacccaccccccggtactcgattttgctctgtacattaatgctattgatctactgttgacataggcatgaaaggattatcaatatgctttgggcagtgcttggtcactgactagccggttgcttttgcaacagcctccttaataaatctgctttgctcctgacattgctgtcacagagatttcagaatcattactgtgctatgagactgttagtccttgttaggcctagaggaggagggctgggtttcttggtgtaattggcttttccttatgtttttcagtttgttttctttgctgtctaaaaaacacaacaaggtcctggagcaagccacgcagtccttgagaggtcccctgagctccagcgatgtccctctcccagattatgtgagtagctgccctgtcctggtcaccaggtcctctgtgctgttagatccttgagtcactgaactttgccaagtctgtccatgtctaagcacccctagacatcttcagggaaggagctgaagaagatgaacctcaagtggtggttattgatagtcaggaatcctagtagttgaaccaaacaaacaaaaacacctcccaaaccaatgacactcaacagaaaagccgtccaaggctgtgtaaagagtgcctgccttgcaaggtgctagtgggggcttgagctgggtccatctgcacccgcttcatccttagccagtattactgaatcgtgcattagtgctgtgtagttatttattccacaaaatgtgttgaattcatggagttttaaagtcctcctaatagtttcttccattaatcagagtacaacattggcgtttctaagaggaagtggtcatatttaatgccaatcatgagtatgactgtaatggtagaacccattttgtgatacacgtttgaattctctgttgaacctctcagttcttactgacttagtgggtttcttcatccataaactttgcagcaagtcctgagcccctggtccctaggatcaccagggaacgctcgctatgacctgtccctgcagctctcgacctaacactgagcacatgaggctgcaacccacaccctctctgccagtcttgctgcctttgcccagagctaacagagcaggagtgactggagttgaatcactacctgtgccaaggatccaataggtgatttgagagcacagtagcgggcctgaagtgtggcccagcagggaaagagtctgctgcgcaagcctgaggacctgagttcgatcccccagcacctagtaaaagtggaaggagaaaaggagttccatagaatagtcccctggcctccgtgggcatactgtggtgtgctcatccccacacatgcatcacacacagtaacagtgaagagagcaaacctgttagcaagggaacggggatgctctccttttgtaattcctcagccgtttaactggttgagtatccttggcaagagccacagatttctgtgtcctggactcaccccagacggcttgcccgcagagctgggaaaggaggaggagagggtctccacagctctggaggtccagatgtgtgctttctgcaccagattggagaccatattagcagagttttaataagtgcttaaaaataagcctatgttttccttcttgcactaacacatagaacactcagggtctgcgtagaggtttctcagtttattaagaaaatgtttatactcattacactgtataatttacaagtcagttgagtaacaacgtaaaaagaacatggcaagttacaaaaatattagtgttagtatttaagtccaaccatgtttgtctgaacacctcacgggaaacccttccatcgcattttagataatgaggaaactgccctggctgttgaagggaaaataatacaaaaaatggtgctcttatcctctgcagagtgcaccctgggggcagtggaggtggaggaagggcagctactgctctgtggcttgcatggctggcatgtgagtgtgcacgctcatgcgcatgtgtctctatgtgaggctttcacaatttacctcagtgagtgggttgatagaggagttttggatggctttttaaaacacttcgggacattcagacaacttactcatgtatagcagagcctaaatatagaaagtgatagcaaatacgttgtagttacttttaactataaccatgtttttaaaattattgatactgttagtgtcacagaggtgatttccttggctctgctaatcaccttagcaactgttagaagcgagaaaactctaaattgcactctgggaagaaccacagaaagtgtgctcgctggttttgttctttcagagagctttgaatcttctgtctgccaaatatgtcatctcactcaggaagtaagttagcacaggtagaaaccccagcggtggtccttaggagaaggatccgagccgtccgtggagtggacttcagctcagtgctgagcagcccatgctggaacgatcccttgttctttggagtcttagtaattccgtccagaggctacttgatgggtgacagcataaagaatgagtacttctatattcttatgtctttaatctctcttggttttaagttataccatggtaaataccaatgtgtgtaatctacataaaaacagtactttcagagcatctgattgttgcagtgtataaagatgtctctggagaccaaaatctttgagaaccattgaaaaatgtatctattacacacacacacacacacacacacacactcaattaaatatacagtcctctgcccagacagttgaatgcactttaaagatcagaaattgctaggtggtactggcacacacctttagtcccagcacttggaaggcaaaggcaggtgtatctctatgaattccccgctagcctagtctacgaagtgtgtatggacagccaaaggccacacaaagagaccctgtcttgaaaaaacaaacagagagagaagctaacaaaatggatttggaggttgggggagacaggatttctagcctagttatcactaaactccctgcatcctcctgcttcagtctactgatgtttactgaaaatccaagctgtgctcctgaaacttgttttcctgaagtcctgtttgcctgtcagcactgctccacctggaaccccagatacttcgttctccattaagtacgctgctccacccctcctttggatagcgctaaggaaacatctattgcatttgtttatataacttatatctgctcttaaacatcggtgttttctgaaatacagtaaggggcattctgacttgattcctataccaagaaaaattcagctcgtgtttctctgtgttattctattgtttacatttcttgtgtttgttctttatgcttggctaggaagagactgtactagtcacatacatgtagcagttatcttgataataatggtatatccagaaacgtgggagtgtgtttgtcattttaaagcagttccttttaggattttcacttttgaggcatgctcggggttgccggccatatttgtagtcacagtaaagaaagtagcatggactggaacacggccaagtcttctctctgggaatcacctcggtgtggctaagtgagcagcgcaccctccacatacagaatctcaaagcaccgataaagttgaagtcaatagacagtagacagtggctcttataaacctgtgaccaaacctaacggacgtccaaagagacagccttccttgtggaagtagggagagggtggagcagcctcctctgaagggagctgatacttgacctgggtcctgttgcgtttgatttgatttttgaaaaggacaatatagtcttcacggtatgcattgggtgcagcagtgtccagcttcaacaggtgctcaagaaccccacatccgctgcagtttggttccatgcgcagcaggtaactgagagtgtgccataggcctaaccatagcagccaaacaccatatggtagttcgataaaggtacgtcatcaggagtttggattaagcaaagacttagatatagcaaaagcacaaagaacaaaaacacttggatagtttggacgtcatcacagtttaaaactttgggtggtagaatgcttacctcagagccatgtaacccagctgtgatgggaactccagcacttggaaggtagagggaggcagtaggatccaacgttcagagtcattgtcaggtgattagtgaattgagggccaacctgggctataaaccctgctgccagaaaataaaatgtaaacttcacttttataggactcaaataagacattgagtcagtaaataaaaacagaaagaagcactaaggggacagaggcaggcagatctctaagtttgaggtcagcctggtctatatagtgagttccaggagagctggggccataaagagactatctcaaaaactaaagagtgaaaggataactcacaagctcatgtatccagaatatatgtgcaaagcatacaatttatcagtcaagataggaacatcatactttaaggtcaggcaaagcatgcaggtcaccagtggagatgcaaacagcatctttaagacaggacagacgcaacattttatagcactttatagagttgtgagacacaaaagagtacttgaaggcctcccttggtatgggggagattctgggcctggggtgttagagaatagagctgcctctgtactgacagtgacaggaagcccttctggcaggggaggctaggtgtgcatagggtgcagatctgaccccaggagagccaccattcaccagccccaggtgagcagcaagaccaagagagactcgccctctgtgtggggacacctgagtgttcctctacacctgagacagggctcttctgtacgtctcagttctccttgaccttgcaatgctgacctgatgctcactgcaccctgcagccccagagataagccaagccagagtgaccatggagagcaaaggatgagtcctgtgggcaggctgccggtcattcacctgctatgaatgcagtgggtgatgcagactggcaaaggactcaccagtacccatttccctaccgtacccccagccccactagacaggaaagcaacgttcccagctcccagaactgagctggaagacgggcgacaatacaggatgcacaggagaaagtgttgtttgcctatgcagtcctccacccttctccctcatcatctgctagcgaggtatggcaaaccagtggaagactgcagcaccccagaaggtggcattgctaagaacactgggctccttgttagtctgtgatacaggtagcttttgttgcaattttgggtgggaaatgtatagacatttcttcaaaaggatagaaatagtagaggtcataaaaaatagttaagcatctccagttatttgggaactgtggatcagaatcatagtgggctacctcttcacacctgcaaagacacctagaggcaggcggtgttagcactgagaagaaggcgggctctcatggactgcttgtgggaatgtgaaagaaggggcagtcttttgggaaatgattcagttacataggaggcagcaattctattcctactggacgcaaataaatgaacacatatctccacctcaacacgtgaatcttcatagaaccattccctaaccatcaaaatgaaggaagcctaaatgtctgtcaacctgtaaaggactgaaataaaatgtagtgttagccatcaaggaaaagaaagggagagacgtgttcctcaatacagaagaacctagaaaacattgtgttaagtaaaagaagccagaaacagggtcacagactgcacggtccctttcattcaagtgtccagaacagacagggcctggcaaagcagacagtgagtgtctgggtctagggatgtgaggcagagtgggataggactactggtagaccctgagttggcaagcgttgcagattctgaaaatgctttcagatgcaattgagatggatgcatatgtttgtgaatacagcaaaagaattggtgatgtagtgtgttagaccttgaggaagccattttaacagtttttctgaaattataattacatcacttcctaccttttttcttttctttgacccccactacatactgttactctctttcaaattcatgacctctcttttttcctttgttattgttacgtgtgtgttcctaaatacataaaaggcagccttctcagttgtgtaatgttcttgtaggtatgttttcagggctgaccagagaagactgtctgtctgctctcagcattcctccgttgcctcagttgcttggtaggcttgaggcatcatgcgctcatcttccacatgagcatgcccactggtatcttccttgttgcagtcatatttaggcagtcatgctggtgaggcatcataggtgtagattctctggttattttaggagaaacagtctcacagcaaagaccctgtgcttctgactcagcagtcgctaagccttgggtctgggagttgtgctgtagttatatcagttgagactgggctccaaagctctgtattgtgctgctgtggtgttctgtaatgttctccatctgttgcaaatcagagtttccttgatgagggccgaggactgacttactgtgagtctaatatatagaatgtatgtagtgcggtggcagtgataggttctcctccaagacgtcatcagccctggctaggtgtccagtaccaggtatgttttctctcttgctgagtaggtgaaatcatttttaagagtagcctttggaggatcggaaccaaagaatcaaagacttacaaggaagtagaaagtgtttttgtgagcagcagcttgactgtagaaagtgttagtgagctagctgcacaggtacacgaaggtgtatgtgcttctcagcactggtgtagagcaaaaggaaaccagcaaaatacacatcgccaaagcactgggcgggatcagtgaggtgaggtggctcagcggggaagggtgcctgctgccagtgctacagtgccactcgaacgccatccccgaactgcatggcgggacaaccacagattgtcctctgacctccgtgtgtgcaccacctcctgcccccatcataaaaagaaaaggggggaaaaatcactcaatcagagcataactaatgtattgcattcttctgtggctttttaaagagtttaatctttatagagacttatgtgagaaataatcttcataatataaatcctttttaactttagattggcctacacacagatgtttaacaatacacttttcaaattaaaatgattagcatggggaagtcagatggaggagagagggttgtgtttttcttcatagacgaggtcttgggacattcggcacaggtgactggcgcttgctgcttcccttcctccttttcaagacgtctcccagagacttggctcaaagggggttggtgatggtggtagtgatggtggtggtggtggtgatggtggtggtggtggtggtggtggtgattttcctctggtttttttgttttgttttttttaagaatttcttatatttcagcttccccttggtgaacatgttagatttctcagaactaaaaagtgactaaaacacacattataaccttgagccttcgtcctttccctgggtcccactgaattgttcaccatgcctccatgatgtctccactgtatttcttgtccttctgtgcttggtgctgctaaactgccagtgagctttgtggagacggtccctcggcctgcatgtggtgttttcttgtgcttgtgctaatgctggcccttcttggccaaaatgttgtccagccgtgtgcgggagggtgcagtgccatgtgggagggtgcagtgccctgtgggagggggcagtgccgtgtgggagggtgcagtgccctgtgggagggggcagtgccgtgtggaagggtgcagtgctgtgtgggagggggcagtgccgtgtgggagggtgcagtgctgtgtgggagggtgcagtgccagctcacactgccgctgaggtttacctagaccactctgctaaggcagtgcctgccaagggcttgcattgtaaacttgtttttccctttgtaattactctgtacttgaggagctgcttaaactgtgccaaatccttttctgccagacactgcctatagcacagatcgcagatttgctggtgattatcagtttttctcattccttctacattcagaaacaaggaatagtttcatatacactgcaaaatgtttgcagtaataagcaaattagcatatttattactcatgtggctgccgtgggtgtgtctgtggggggtgttgtaggggggtgtgggtgtgtgtgtgtgtgtgtgggtgtgggtgtgggtgtgtgtagggaactgttgagatctcttcacttagcagatctcaagtacacttagaaatattcctaagcaccgtccacatctgcacatgaaatccacagagcccatttgttgtacaacagaccgctcatgcctgcttcagaacatctgctagctacttcctctctgcttctgtgagctgagcttgaagttccatgcagaaggggtcacacagcatttgtctttctcacatagctcatgcccatgctgtttcaaatgacagacactcctttttatgcttagtgacatcgcgttgtggtacacacagcacttgctggtgggccagtcatctgtcaggaggcagttgaatggtttcctgcctcagctcccaggaatcagccacagtgaatatgagggtgctgataactctgaggtaccgatttcatttcctctgggtgtatgctcagaagtgaggctgatggttttaatattgtaatgaagtatttcctttttaaaacttctatattcccataccacctgtggatatacagttgtttttaaatgtcaggcaaaaaaagttatttcctaactaaaaactacgtgacttaaacataagaccagtcctccatatgggtgtcccgttgtggctgggaattgtgagttccggtttctctgaggatgatcctggttctattatttgggaacttgtagttggcaggctcccatcctgtgtgtaagaatcctacaggcaaggtgggcttgtgctgagaggaagggcgtcggcagggagagcggcctttaccagtgcttctgcaggagtatggtagatggctcttttaaggattttaaaagatcatttaaaatacttaaatactttttctgttccttcctgtaggacatgtttgcctggactgcggcaatgattaattaatgttctaagtgaagtttaaagagcacagaaaaatacaacccatgaatattaaagtcagcactaatgggtgatccatttggtttttttaaaaaggaaaaacctgatcagtttcttttttccccttctttccattctatggaagctgttttcttatctacaactgtgtggaactggtatagcaacgcctttcccggtggtgtctccaagcttcccttatttggtcaggaaaccccattttgattttctgtttgcatgcattctgatggcttgtcttccccctttctgcctcagttcgttgttcctaatggggggagggggtcctagcatttggaattttctttgatttacccttgatttacatggcaaatagaaagcagctgtccacttaagcatctcattcttggaaccatagtcccctccagcgtcatctggaaatgatggagcttggaaagcacagctaagaagaaaaggcaatgtttgttttatgtgggatgagtgatttctgttggggtcctttaattcgcctattatgagggttattaaaaagcagtattacaaaagaggcttaaatgaaaagaatttttttgagctggtatcttattattacagttgattatagtcaaagctacaaatgttttagaagtggcactttattttagtttctccaaataagacccaaaaaacccagtaatcttactcattgtatgagtggaaattcaatctttcccttgattgatttaatttctgaaaacaaattgtgtttgagaattcagttctagcatttttttcatggatttctgaaaatttcttacaagaataatccttacaggaatatttgaggatcaccatagagcagaaccctgaaatgcatccatccagtagactcatggcgttctttaaaagtctgcattcccagcaaggccttggcaacttagtgcattcatgacttccttgactcctaagccgtgaatgtagagggttcagtgctgggaactggtttactttaggaagcaggaaagtcattcttgctttgacaggagttagagtcattctgttattggactctgtcaacttttcatgtctgttaatgcagccgctgcttccagatagctactattcaggaattttgtttccagggcttaagtgagggcgcttagcctgtctgtctaactcagtacggcaggcagactcagttacttttgtgcatttgagtaacctgtcgtctctcctggtattttctaagatcttaaattgatgttttgccaaaggacagaaaaagtgtgtggtattcctttggcacacagcgctggtgagcacactgagcgcctggccattcatcctctgtaaggtcgtactgttggctcagggtgtcttaacaaaggataggttgagaaacttcaaccataaacacttccttctcagaatttgaaggctgaggtgcaaggtcagggtgctggcatactgagtttcccgtgtgcttaaggggccttttcctagcacctgcacccagctcacccttgtctgtgctgcccatgggtcctggcagccctgccctccccacctgctcacctcccgatcccctgtcactttatactccgaggtattcctgtgagtttggaaaagagttgaaggacaggctagatttgttggtaatagttgcctccaagtgaaggagtgtattcaaacggacaggagtgaagctggttctcggagtagctcttatcctgtgaggcgactgatgaactatacctgactctgaaacaacttaacaaccaaatgaatccagttggtgagcaaccagacatctaaatggctcagtccctagtaagctgtatcataatgacacaggcaagaggggaccagatgatgtcactggaggcatgtgtacagaagctctggctttgtcatttgaagatgcatgtttgtgtttcgtgagaacaggcaagcagtggagacacgatgtcgtttccccatggtccttggaaccggagcttccaagggaaatgagtatagacggtcggaaaagaaaagcaatgatggagaaccctttgatcttgaatagaggtgatctgtgtggggcttgtctcttcatatcttttgctggtctggccattttacttctagtctttgaactcataaaagcagtgaccaacccaaccaactagctttgatcacctcagcagtggctcttccactggaagcccagccagtccgcccctcagtactgcaggtaacagaatggatgaagggaaactcccttgtggagaggccttagagctaataaccagcagtgactttgtggctgttggcttccagaaagaagctgctttagatctcattcatcccggctaggacacacccacctatgaagtgcttttaccgaaatcaaaacaaagacaaacaaaaaccctgtctatttgagcctgctaccaatttaaatatcaaaaaggacctattgcatagaacttgcaggtgatgatagagttatcctccttcctccctggaaacagggcagtggattctgcttctaacaagattgctttaaagctggtcttgaaatagagaacaggagcgtggtgaccactctggtgtccgttcttttgcttttgtttcatttgtttttctgatgtggtttggattttgtttttgtgtttggagacaaggtcttactgtgtagcaccggctcttctggaacccacagcagtctttctgtttcattattacatactccattcttttatattacattgagaacggtataaaaaaattgcatttacattttcacaaaggggaactacaaagataaataatggactgtagaaaaatctatattctctgtatgtgaataatgatacaaatctgttccccaactcccaagaggggaaaaaatttttaattctcattttataaatcactaattaatcacattgtatgtccaagttttgggttccaccctacaagagtggactgtgagttttcatccttttaaagctggatagagaactgagtatatgaaggaactggggcgatcccaagcttcaggtatagacagtgtcaggtaggcatattgtgctggctagttttatgtcagcttgacacaagctgtagtcattttggaaacggaaacctcagctgaaaaactgttctcactagcctggcaatgggcaagcctgtgggatattttcttgcttgacaattgtgagaaggcccagctcactatgggcagtgccgccctgggctggtgctataagaaatcaggatggacaggcagtgagcagcaattttccatggcctctgcattagttcctgcctccaggttcctgccctgacttccctcatgatggagtataacctcagagctgaagatgaaacagatcctcctaaccacgttgatttgggttgtggtttatcacagcaaaaggaacctaacaaggacagcgtatctcaaagaatcagttgtgagttgaacattgaggatgaggatgaagaggtgtccgttgcgtttaggcaagcaggtggcacttgacgcttgagagtgtttggtgtccatgctaaatgaatgctgtagtcactgtaaggagtagattattttagttgaagtctaagaagtagggaccagcatgagttttctcctctctcttctatttagcctttcgtactctgtatttctgttgttgctgttgttgctgttgctgctgctgctgttggtttgccttgctctatgaagttcttatctgggcattaattatagtaggtgagcttgtctaaaatagcaagggaaatggctaagctgaagagctcaccacacaccgcacaggacatgagttcaaaccttcagaacctgaatgacagtcaggacacagtgtctcgaaattttaatgccagtgttgaagatgtagagaaagaaggattcctgggacttggtggccagctcagctagccaattcagtgagttccaggttcaggtgagaggtcctgtctcaaaaaactaatgtgcaggttcaaagaaaatactcctaaaatgcgagtataagtgtgcttgacaaatgtttgtcattttcctatcaaaatggagacaaggaagagacttgagccccaagcaccagagaaggaagtgtgtgctgtctaacaaagggtgacagtgccatgtgcacgtgcgcgtgtaccaactcagaaagcttacactgtttttttttttttttatctcctgcttttatcccagtgtccttactgctatattacttctgtagagccttctgtccaatgagttcaaagcacttaccgtcatcaagtcatttatttcttggatttattgaatgggcacccattgttcaaaagcctgtgggcgtaagtacaaagttataaaagcacacaaattaaatgtaatggcacaggaataagagagaaaagcctgcaggattgccgctttgcctgttaggaatgctgtactcttatttaaaaaaaaaaaaaagagtaagaaaggaaaagaaccaacaacctggacttcatcctgtcctgagagctacaaaagaatctgtcagaggactgaccatgctgtgctgctcagagaagcctcattgaactttggaagcattctggaatatactgctcctctcccagacctagttttttgctctagaagcaatgcataagaaattcttgttccctccctctgtctgctgcacacattcagacaaaaaggaattggttgaccaccattgtctcagcaacatcataaaatgtgaggtgtagttttagtctcaggggcccagctaagtcttgggttcattttcaactttttaacatatagcagaagagcttagttgcacattgttgtggttataaaaagataaaggggtataaaaatatgttctatgggggtgtggtgaggtgtgggggaagggggtatctcagcgggcccatgccaaggcatcccttccccctgagggaccagccacatgatggtatagtatagaacagggtttatttagggcatggggaggggagttaagagagtagtagaggcaaagacaaaggcagagagagagagagagagagtagagaagtagaggccggccatggtcatatagaatggagggagcaagaggcaagaataagagagtgaggaggggtcaagcagccccttgtatagtgtgccaggcctacctggattttgccagataactgggggggtgggggagggggagtccagacagaataccaaaacacgtgcttggccttgatctggtgctgaggatgggagctagcacggaatttaaaactgaactcattaattgcattgataaaatttttccttaagtttaaaggaaagaaatatgagcatctagccgtagaccctcataaagtagtaaatgtttggaatccctttcaaacttcactttacacataatggcagagtcctggccacaggaaggagcttgccctcacccgagaaggcacactttggtgttggtaatctggggagagattggcacagacttctgataagcatacgttccaaccctaggtgctttcttctagaatgtccttcagctggagggctctgatgacatgtggctaatgaggtattacagccgaaactgggacagttctgtgttcctcatgcaggcctttccacgcctctctcttcccttctctctgcctttatattatgtcccataattcacagctctccccacaggacccatgagccagctccacctttccataaggtcattcccatcccatacctgttaagtgggtggcctgtgtcatccgggaaaggcatggtggctctttggttggcgttggcagaagcgaataaaccacatcacttagcctggtgacctggaatccctcatcgtcagcccaggtgacagagctttgtcaaggccagatcacagaaaagcacagaatgctgggtgagcatttgttcagttccacattgtcaaagctcttacaggaggctacagggcactttctgctggccgctggcttgagagattctgtcaatgcaggcgctacctgctgcacatgtatctagtgtactgtggagttctccctctgtgcttttgtctgccttttggttttcttatgcttttttgctcaacatgtataatttctcatacagtttactcaaattttaacagacttaaaagttcaagccacagagaaggttataatcattctttaatttggcttaacacaccagagttagagatagctgtgacttttggataataaccaacaaattagttcaaataatgtcacaacacatttcttatatatttaaccaaatgtgtaggaaagctctgcttcccagaatgcttgcttagagaggcattgttccttaggagtgctgtggggttactaaaattgggtttttactgccatcaactaactcctaatgtgatgtctcaggaaacccaaagtgatttcaaacctagagccttgcttatgctgggcaaatgttgtaccactggctagttaggactgttttagctgacagtgagccccaagaatgctgggattgcaggcacacatcatcacacccaactcagggggtaaaaggggaagtggaggaggacacccgtgtggtgtgccgtgctgtgcacatggaggtgagagggccacatgctgaatgggccacatgcagtccattgtttcagaatcaagccagagccttgttgccttcccagccctcactagctttgttggtaagaacagatttttctgtaattgttcctatacatatttaggtccttgccaaagttaaatgaatgacagtcattatgaaaaaggctttctgtcaccctgtctcatgtagagcaagaacggttcagtgtgtagggcgtgcatctgagataaggcgtcatcttccatcactaactctgggtctcgaggaaagcatggtctgcctatagctaaataaaaaccctgaagctgcccatttctcctctgcagactcctaggccagccgaccagacaacggtggcacttcctgttacctcaggctcatttctttttcttttttcttttctttttcttagtaaagatgagaaaatcaggctagaaaagcaaaattgtgtttgtttacttgcttatgtttggttttgctgaaataaggtctcactgtgtagtctgaacttacccaaactcaaagttatcttccccctgtctcagtctctttagtatttgaagaacaagcacatactactatgcccatcagagaagtcacatttcattgtcacacatttctgaagccctcaccctcgtggttagtcatcttcaagtcagacagccctgtagctctgcagtagacaggtcctgtgtttctgcttaacaagacagtgggtttccccagaggtgggaggagttgtttacctcagagtgctccgtgcgcccttggcccagcactggtcccatctcatgagagcgtggctgtgaacataccagaggccaagccttgtctgtccccagggcccactctacccatccagccctcaagcataggaagtgtgaggcaggtccaggaagaagacgtttgcttgtcaccttgctcccagccgaagccatgatgtcacagttcagtgagttttagtaataagtgacagaaataaacaaatgtttgagagcgtgacatactgtagagaacatcaccattacattccttcctggtgcggtcgctgtgctttggtgagaaatggcaccaagtaaacccggtgcacgtgtgaaacctaagcttggctccccagcacccacagagaaggctaggcgtggcaacactgcctgtgagattactggaggggcagacactagggtcctggagctcactggccacaagcctagctgagcatgctagctctgggttcttggagagaccctgtgtcagcagaggaagatggacagacagcaggaggggatacccagcattgctctcaggcctgtgtgtgtgtgtgtgtgtgtgtgtgtgtgtgtgtgtgtgtgtgtgtgtgtgtgtgtgtgcgcgcgccgcgcgcgtgcgcacagaagagttgcttataccaaagcattaggccaggggccacatccctctttacaagtgagttattactgtgccattttgtgaagggtggacttcatgttagtcaccacttgtttgcttcctattttaattttaatcttttttttccatttttattaggtatttagctcatttacatttccaatgctatacaattttaatcttttacttattgataatttctaaaaacttcttcctgggaaatagaagcagatctctctctctctctctctctctgtctctctgtcacacacagagagagacaaacagacagacagcagttaacagaagatgggccctcctaactcaggacgtgatgacactgggtgtctctctgaggtgggccctctgaagcctggccttccaaagggagcagatattcagttctactacccccaccctcaattgatttcatagaatacgaacataaagaatgaaaaatttgaatttttaagcatataatcacaagcaacaatagttggaaatggattatgtatgttctttgggtgcctttgaggtttgaaaaatataaacccactcatatttgtaccagggatatcttgacacttgctatggcaaatgttctttgttaatataaagatcctcagactgcttttaaaatcaatttctgccataagaaataaattgcaaatttagcgcagggccacctcctaaagtttttgaatggtaattgctaggcaataggcagttcccatggcaacatcagtgagccttgctctaattgtacatacagactgagtcaccccattgccgttgcccttgactgaagtgtgggtattagtagatatctggacaaaatgcgggcattgtcccattcattaggcaactgtaaccacagcttttgatcatcaaagtgctgaattgtatagcagggtttaagtcaggctgtcttcagttagggtcacctgcatcagttatggtcacagcattatacttagagtatttttaacatatttctaaacaaattaactgcttattgtaacaataatatttactttttttttttttttttttttttttggtttttcgagacagggtttctctgtatagccctggctgtcctggagctcactttgtagaccaggctggcctcgaactcagaaatccgcctgcctctacctatatttacatttttttaagttctcaagttttcagttttaatgtacatttttacttttcgaaaagctcaatatatcttaatattctgctcttaaatgttttctgaattagtatttgtgttcattctgcatttttaagattttattgtgctaattatatgtgaatgtatgtgtgtgttggtgtgtgtgcatgtatgtgttgtgcatattgcatgagaatgtgtattagtgtgtgagtatgtgtatgtgttgggggtgtgtgttggggtgtgtatgtgaatgtgtgtgttgtgtggtgtgtgttgtgtgtgagtgtgtgtgtgtgtgttgttgctccatgtatgcatgtgctagggccggtgatgttagatccctgcagctggagttggagacagttgtgaccacccaaaatgagttgtgggtcagagctcagctcctctggaagagggccgcctctctgaaccccgagtctgtgctcccccccccatgtcagcccgtccgtcccttctcctacctcacatgtttgagaagagaagcattactctgtagtttctgacctctggagctccctctctacacctaacaagatgatcgtgactttctcctctgccgacttactgtggccacacggagactcagccctgagactttttattacagccttggatctgatgtgcatgtgcgaagtggactgttttgatgacactggtcttttacttctgaatgaactttcccagacttcgaagccatacttaatgtttctgatttaagaaagaaggaaacgagggttggtgaagtggctcagcgggttaaggtgcttgtggccgagtctgatacatgagttcgggaagcacatttgtcccctgaaggagagaagtcactcttagacgctgtcctctgattctcgtgctcacgccttggcatgctcgcccatgcccctcccccttttatacattaagtaaatgaagaaatcgcaccaaaaaattgtcccttggtctagagagattgttcagtggttaagagcacaggatgctctttgagaaaacctggcttcagttcccaaaccccacgtgatggctcacagcgtgtcacatcgtgtaactccagttctagaggacccagcaccttcttctggcctccaaagcatacacatgctaagcatctacacattcaggtaaaacctaaaacacccagtcatgtaaacaccagtcagtaaaccattttaaatgcttctgtagtcttgtatgttctctatataaacatttacatttttgctaaagtattttatagtaaattctggaattttatctcttcatactttgatatacatctcccaaaacattgtcattttctttataatcgcacaccattctcgtacctaacaaaagcagtaatgttcccaaggcatcagctcatgtagcacaatcctatttcttctgaattctcagaaatggctggtggcagtgtgttaagttagaattaagattcgcacatatggttgttatgtctcctaagtctttaaattagagcagtccacttcccttttctccccagccgttaacacattgcagaatcccggccacttgcacagcatctcccccactctgagcagggctttggttttgggttggggggtcagttatctcttggtcctttaacttgctctctggtcctgagtcatggaagtgggtatttacactaaaggtttgcacagattcagacagattcggctttcttggcaagagctcttcacaggagtccagcttgcttcccccagcggattggacagttccccttagtcctgtactgtggtggacactagagtggtttccccaaactgcaaactcaccaccttgactgtgattgaatactggaccttaattaggattcaaagagattgtagaggtgatgccctcatccaatagggctggggtacaccaaagtctgcctgactctagctgctcacagaggaaggccttggggccacacagagaaggtgtctgtctccaggctgtgtgtctgtccatctatctcccctgctgcatgtcagtgctttccccttctctcttcagcagtgtgtccatttctgtctgcacttaacagaagaggacattctgctcccgtgctcagagctggacacaggctctgcctttattccgctgtggcctgcttcctttgggtttccctctggtttatgtcatttactgtctaattttactgttttgatatgattttccgtctttgcagggctggagagggttcaactgttaggagtacaccctgcccttgcggaggaccttcacccacacccatgcacatggccacacagagacacacagttaaaaagttgtgggtttttgtttgcttgcttgtttgttttttaaatctttgagcatggtctcactgcagtcctagctggcctggaacttgctgtatagtaaggttgccctcagactcacagtgatctgcctgacaacgtttgtttttggtttggttttgttttttttaagtgactggtttttttgttgttgttgtgttgtttttcattattctctctctctctctctctctctctctctctctctctgtgtgtgtgtgtgtgtgtgtgtacaaaagaacaccacagagcatatgtgtgggtcagaagacaattcttaggaatctgttctcatctgccaccttgtaggatccatgaatcacgctcaggtcacttggggcctgcatgtgacagcctcagtccgagtgccactttccgggctggatctgccttttgaatgcaccttcggttgcagctcttcagccgaagagctattcgtgttttctgggtgatttgcaaggctttctcatctgtcctttactttttatgtatattgctagcatttcccttgtcatcactctttctcccacgtatacagtccctactttgatttcattaagtctctttcattcaaagctggtttgtttttttttcttttaagagttttgagccccacccccacccgacacatacacaactccttcctagctctctatgaagcttatgaaataggtttctctcttttttttcccttttcagttttccttacatttgggttgacttgacggcccagctggccacccttccagaggccccacccggttcagttcccatcaagcctgtggtgcctcacagctgtctgtaaccccagtgccagaggtagaccgccctcctctgcactcctgaggcacaggcacaggtgtggtgcacaaggtgaaagcgctcatacctgtaaataaaattttaaatgggggaaaggacattttaacttcattttacattttaagtctttatattctaggaatcttttgttggaaaaacagattagaaatccatccttcatggtctgtggtggttttgtttttccacttgattacttctcagggccagattcagtgccctttcctctggcaggaaatggagtcttagagattgctaacttttctcacttttctcctgtggtgagtgttcccgaggcctcgcctgcctttctcttctgcctgtctgcccttgagtaactcggcccagcatgttgctatggtggaactgtcagtgagccctgattcctcttctttttctctctctttttttaatgttgtatattaaatgttttcttcttttacatttcaaatgctatcccctttcctagtttcttctcctctgaaaatccccctataccctcccacctcccctgctcccaacccacccactcctgcttcctggccctggcattcccctatactggggcctagaatcttcgcaagaccaagggcctctcctcccattgatggccgactaggccttcctctgctacatatgcagctagagacacgagcactgggggtactggttagttcatattgttgttccttctataaacctgctgacccctccagctccttaggtactttctctagctccttcattggggaccctgtgtttcatttaatagatgactgtgagcatccacttctgtatttgtcagacattggcagagcctcacaggagacagctatatcagggtcctgacagcaaaatcttgttggtatatgcagtagtatctgggtttggtggttgtttatgagatggatcccagggtggggcagtctctgcatggtccttccttccttctcagctccaaactttgtctctgtaactccttacatgggtattttgttccccattctaagaaggaacgaagtatccacactttggtcttccttcttcttgagtttcatgagttttgcaaattgtatcttgggtattctaagtttctgggctaatatccacttatcagtgagtgcatagcatgggtgttcatttctgattgggttacctcactgaggatgatatcctccagatccatacatttgcctaagaatttttataaattcattgttttaaatagttgagtagtactccattgggattgcaagctggtacaaccactctggaaatcagtctggcggttcctcagaaaactggacatagtacttctggaagatccagcaattcctctcctgagcatatacccagaagatgctccaacatgtaataaggacacatgctccactatgttcatagcagccttatttataacagccagaagctggaaagaacccagatgtccctcaacagaggagtggagacagagaatgtggtccatttacacagtggagcactattctgcttcctcctcttgcactgctcacacagctgggctggagtgcagcacccgggacctcatgcagcagcccctatgaggtgttcctctgccgctcctaacaagagccgggctctccatgcagttcattttatctcattgacttacagagtcatccctgataggtcaggaagactccagatgtgcaacttttctggtgttcctgataatagaggaagaaaggcattcttctcctaagcaggaactcaaggccattttctggtttgccatcttccaccacaccccctttaactcacagagcccatctgaaggaactgagcacaagaaagtgatttgcttaagacaactggaagccagccccggatgcccaggctgaccagtgctcccacacacacaccaggtgctgctgtgctcagcatcaccgactctgagggggattgcccggctctcaggcctgtgccggtcattctcacagatatctgtgtttctgtcctcctcagagctaccagtgactagtcaacgttgtgaaggagtcagaagcaaaattttaattgtattcgttcgaggtcactgaagatttttttttatgttaatcatttttttggtagctaataaaatttgcggagtaatttttccactttttatggagactcaacagtgagtattgattttgcagatgactaacctggttgactgagcagaagttgctgagctgaggagggtaacactgtggctctgggctcaccgaataggaagacagacactcagggagtcaaagcttgaagagcaggcggggtgggggtgttcgttgcttggttcattgctttctttgtgggcagggcccatctttccctgagtgttgttttaccaggatttactcaagattttactctttatcgagtgtagaagggtgttttttcacaagaattcaaagctgagtacagactatgaaggtgagcatttacattgtcaggctctggcataggcgctgtcacagctgccagcagaagcccggggaaggtggcctgctctgctctgaatggcacccagggcagagaagccactgcaggcatctgctggagcacagctgccccaggctgagaatagtccccgtgcagccctgcctccagctccctccatcagccgcagagttggtcttctctcagaacattccttcttttgtgaattgtctgtccggtttccagttgtgggaaactgaagttaaccaatgtcccctagtggccacagttatcttacttcagtgccaccagtgccagcactacggtgtgttatagatcacttgtcccagggttctaggcgaggcctgtgggtgacattcagactgtgtccacacaaggggaagaagagtatgggtctcacattcccacccaagagaggcatgccagagctctgcttccaccccacctgcctgccccactcattaaagtcacctattgtctcctttggttccaggatttattcttgggctgtgatctgtgtgtaatataaagccagttctttctatcacaagctggatgttttgggagagatccagttgtggctagaaataacatggtcacaaagcttttcagtgtgtgtgccagtgaattaacaacataaagataacaagtctatcactgagagcttgcctttgaaggccggagccgtgcctctgcatttcctccccctccccgcctttggcaaagtcccattaattttgttgaaggttttattttctgctgaaaatgcaggaaatttagacaactttcttggaatccccccaaaactaatacaaacaagatacatatgcttctcttaaggaaactaaaaataaatgatttgaaactgtataaattccctcttaaaaggaaaaagaagtttttaaaatgagaggcggctctgagtgttgttaactgggtaaaatattcccacaactgccaactgagccatcaatattgaattattacttgacacagagttgttggactctcatccctacatggacagagactgggactgatcaccctgggtccttgtttctacactggaactgtgtgcacatgctcacaggcacatgtgcgcacacacacacacacacttggctcactgacttgctctgggctccattcctgccatgcaaactgtgtatcctgaaaagagcagggtgtggatgaggaaggcacatgggtttgttctgagtactaggttgcgctagccaggagccgtcatgtggcttctggttttgacacagggatttcccctgtagctcagactatcctagctgaaatcttcctgcctctaccctgagtgtttatattatgttaagtttgttttcctgagatatagggtctggaacatggctagcctggaactcattatgcagtatgtaggccaggctggcctggaactcacagagatcctcctgcctcggcctcccaaattctgggattaaaagcatgtgcaagcacacctgactatctttcttagtttcctttcattatttattttaaaattttgttttaaatgtgggtgacagtttgcctgaatgcatgtctgacacccccacaagccagaagcggatggcagatccttagaactgggttataggtgatgtgagcccccatgtggatgctcagaactgaacctagtcctctctgaaagcctcaagtgctcttaaccactgagccatctccggagccctgtgctctcattacactgtaactggctcttcagggaatactgtacagaaaattgatttacattctgtaatacagtaaactttataaaagtaatatcttttaaaaatctaaccagttccttcaattctctcagctgctcttgctagagatgctgtttgctgccgtctgaggtggctgtcgggccagtcaaacatctaaatcccagcactctctggaatttgaggcttgatatacagagacggagttccaggacagccaggaccacacagagaaaccctgttttgggggggggggggaagaaaactaagaaatattatttctgtgttctttggctttttattttttcatttaatagttgtcttagggttttactgctgtgaacagacaccatgaccaagacaactcttataaaatcaacatttaattggggctggcttacaggttcagaggttcagtccagtatcatcaaggtgagaacatgacagcatccaggcaggcatggtgcaggaggagctgagaggtctacatctccatctgaaggctgctaggagaatactggcttccaggcagctaggatgagattcttacagcccacacccacagtgacacacccactggaacagggccacaccttctaatagtgccagtccctagccagagcatatacaaaccaccacagtagtaatagctaaagaagaaaaaaaaaaaaaaaaaaaaaaaaactgtgtcgttgttgtagttgtcattgttgtggttgttgtggttgtgtttgatgttgttgtttacttcaaagtatacaagttcccacttggaaagcagtgtgtgtctcctggaatccccttctgcaccctatgttgcacagtgttaagggctttacaaatgctactcagctgttaaaaacaatgaatttatgaaattcttaggcaaatggatggaactagaaaatatcatcctgagtgaggtaactcagtcacaaaagaacacacatggtatgcactcactgataggtggatattagcccagaagctctgaatacccaaggtacaattcacagaccacatgaagctcaagaagaaggaagaccaaagtgtggatgcttcagtccttcttagaagggggaacaaaatacccatgggaggagttacagagacaaagtgtggagcagaaactgaaggaatgaccatccagagactgccccacctagggatccatcccatacacagtcaccacacacagacaatattgtggatgccaacaaatgcttgctgataggagccatatatacctgtctcctgcaaggctctgccagtgcctgacaaatacagaggtggctgctctcagccaatcattgaactgagcacagagtccccaatgacggagctagagaaagaaccgaaggagctgaaggggtttgcagccctataggaggaacaacattatgagccaaccagtatccccagagctccatgggactaaaccaccaaccaaaaaacacacatggaggaacccatggctccagctgcatatgtagcagaggatggccttgttgaatgaacatcaatgggaggagcggcccttggtcctgtgaaggcttgatgccccagtgtagggaaatatctggacggggaagtgggaatgggtgggttggtaagtagggagagggggggatgggatagaaggtttttggaggggaaactgggaaagaggataacatttgagatgtaactaaagaaaatatctaatgaaaaaaattttaaatgctactgaaacagaacttcatggaaaaatatctactaggaggctgagaggtcagctgaggtcagcgactcccacttagcatgctcagggcctggaattcagcacccggaccagtttttaaaaactgagtagcatggaataaataacatgattaaatcaactttgagatctaaagtaagtcgtgggatttggatggtactgtcattaaaggaagtgctacaattaatttatgctaggttgtttttatccctttttcaagtagtaattattgcctaataatgcttttttagaaatgaaacaaaacgaattttattgattttttttcctgtcagatattatgggtacctgcctcaggatccagtcagagtggctggcgacttggtgattcagactagagtgtatttagtgggatagtgtttcttggaaattagaattaagcaaaagtttgataatcttgtctttagcaaatctgaattcccctggcatgcaatttaccctgattatctgcttggtgcctggaagctgcagttgatcctccagtggggatgctcagacccacagaggagtttctaggaaacaacataggaggaactccggctgtttcttaaaggataattaaagtggttagcaaagaactgttgccacttaaaatggaaatgaactagttgccagaactgtgtgcggtgtgttcaagaatagactggttgatccctgggatgaacaggagggagggagggagggagggagggagggnnnnnnnnnnnnnnnnnnnnnnnnnnnnnnnnnnnnnnnnnnnnnnnnnnnnnnnnnnnnnnnnnnnnnnnnnnnnnnnnnnnnnnnnnnnnnnnnnnnnnnnnnnnnnnnnnnnnnnnnnnggagggagggagggaagctagcagtatggcaggggccagcagccgcagccttgctgcccggaagcttcagagcacaccttaggatcacacagtaggccacctaattcatgactgcactaaacaattaccatattgaataaaataatgtatatggaaattcttagtacaattttagggacataattaaaaccgaccatgtaggtgctgacttgaaggcgaccttggtctttctcgggagtcagagcgaaccctgtgggagtaactgtaactggcatccagctggtgcagccttggagctgcctaagctgcgtcccctgcatcctgctggacgcacttagctgcactcattagaatctcagctgaccttgtcgcatgcatgccctgtaggttttagagtcaactttatattgaaatgttaatgatgtacattatttacagtgttacacggtagaagagatattggtaggaagttattgtagtctatgactcgttctaagcttgaacttctaaattatatgtaagttctcatttttgtttcctaatcaattcataacattaaaataaccaaaactgtcttacattctagtaaaatatgacatcatataaagtgtccttcctttgtttcccccaactgtatttttagttaatctaaatgatagaaactgtatttcttgccatttaatttatatatctacggctaaactgtagtaatgtagtcatacattaaaggatagcattaaaggatagaatttgccagagatccaggcgtggtggtatattcctttaatcctagcatttgggaggcagaggcaggtggctctccgaaagtctcagaccagccaaaactgtaatagagatatcctgtgtgaaggaaaaagggggggggggcagggctacttaccagagaaacagtagcagaaaagttaaatagaatacctagtaactcctttaaatgtgaggaagttagcataactctgaaaaatccttttgccacactgaggcacagtaaccactgatagacgctggcatagagatgcagagatgcatacctgtaggctcagcatctgagaggaggcagagaggcaaaaccagcctcgtgacacagtgaattcaaggccagcctgggctacctgaaaaccagtccttaaaaaacgctaatgtggggcatgcttattgattttgaagcattaaagtttccactctacacttccctgactagtgtcttagcttgagattaaatgagcaagtcctggttgtttggggcaattacttaaacattgggaataaactaagctatcagcacatagttaatcctgggaatgtgcatttaatctgtcaggacttacacttaactaaattgatgtgtaaaaccttcattagaatgaaatttggcatcttggcatgctcctgaagtaattaactatcaggttaggtttctctaaaatgacctcagaaaatcctgaaacacattcctcctctaagcaggcagctaagtggacattctgacaaatgttgttgaaatttacgaagctggaagttgatctccccctttgccctgaaaacataaacttatagatgtctctaaaatgaaggcatttgaaatgcatagctatggccaaaactgaggtcagtgtttcttgatgagccccaaacagagtgagcagtttggggatggaacagattgactgaagagatgctgaccatggggcctgggaggaggccatggggcctgggaggtcagcagttgatagtaccacactggagagcttcagggaagcaacataggcgtgcacgcacgcacacacacacacnnnnnnnnnnnnnnnnnnnnnnnnnnnnnnagagagagagagagagagagactcccctgctgggaagaactaggaagatggctcagcaaaagcctctctagttgcttactttgagttgctgccttgcagtcgtttcacagtcagagtccaaaagactgttgtcttcattactgtcctcatcacaaattcctgagcagcccccaaccctaaaaaaggaaatcagtctaggcaaagaagagcttggctcacagctcagatgaacacagtccttcatgtgggaaagcagcatggcagagcacaaggtgacctgtcacgttggagcctcagactcagcccatctttctcagttcccctttttacttcagtctccagccccagcccataggatgctgccacccacattcaggagtaaacctgggttaaacctctctgggaattccttcaaagacatagccagtcaaactgatcacagggacgagccatcacagctgtgaactctgaggagacagtgacagaaacacgggctaatgtatgacgttcagatggtggtgcagcccacggggggtgtgtcctgacgtgatcacttttcttgtagtggctaagacttcgggactggctacgctgtggccgtctaatgatttaggcagagaataccaataaggatctgcaagcgggagccaaatggcctgcacgttttcctctgtattggctaatacctaacttagtatataagttttaactttcatcccttagtaacagatgaacctaactttaaaattcttgacaagctcttgaaggccatacctgtgtaatctttccagtgcttttgaaattgtcactgtcacttgcatttcggttacttctgtggcagggaccaaaacactgactgcttgttggggtttcctttcttcacaaggcacaggacctcagtgtcattgaagaagtgattcggatgatgctggagatcatcaactcctgcctgacaaattctcttcaccacaacccaaacttggtgtacgccttgctttacaaacgggacctctttgagcaattccgaactcatccctcattccaggacataatgcaaaacattgacctggtgagtgtgcgcagaggcctctagtctctgttctcttattacttatctatgacgtcagagccactgcgtagcccaggttgtcttcagactcagacaagactcatcatcctcttgccccagcctctgacgcactgggatctgtaggtgtgggcgccacgccaaccaagactcctttctgagtgctgaaaggaagacgttcagtccagccaacttgtcagagctgtctaccaacagggaatctctttgggcatggactgtattttgctcagttgttttctctctctctctctccctccctccctccctccctctctctcccccctctgtgtgtgtgttaaatatccacactcaataacaaagtttatggtttctttaatacaatactatattctatcttactgaatatttatctcattaatatttttctatgatatggtcaactctgaaaatctttttttttttttttaagacagggtttttctggttgtcctgaactagcactgtagaccgagctggccatagcctcaaactcacaaagatctatttgcctctctgcctctctgcctctgcctcccaagtgctgggattaaaggcatgtgcatcactgctcggcaaatatctccaatttccatatctatcaggcctatattgtagatatcctaaaatatatttaaccattattacattattgtacactttcattgtttccagtgtttcttatcaatttgtaactaatgagcagtttgtaaataaattaactcacatttcggttatataatttggggctctttttgtttgcttgttattcgaggcagggtggctctaacgccctgcctgaaggagactttgatttattgtctgtctccatccatctcttaagtcagggtcacaggtgtacactaccatgtctagcttatcttctggtgtagttttaaaactggaactttactgagtcacaccataagaggatatctgtatttccacaatcagtacatcgcctccttttcttcctcctcctcctcctcttcctctccctcttcctcctcctaacctcgtgtgggctcgcacctcagcaacaggtgttctcatggttgccactgccgtagccatgatgcagaagcccagtgtacatgtgaatttcttctgctgagcctgacattttaggcagttctttatatcctcaccattataagctagtgtcccacatagacttactggtatttgcatacttgagaacctccacgtcacatcttaaatacaccttttctagagaacagagggacaggccattgccaggcaatgtttgtttagcatgcaagaaaacttgggtttgctctcacccctcagttgggagcacagaagtattttttctgattccaaattctccttaactgtggatttaattttcataaactcctgctttcattttgtttaaatgtatctaggtggtttgcctacatgtgtgtatgtgtaccatatgcatacagtgcccaagggggccagaagagcaagtcatagctcttgggtctgaagatacagttggttgggagccactataaccactgagccatctctcttcctcataaactactttaaaaattgatagctattagtattaatgaaaccatgaaacaaattattacccaagggatacccatctcaaattgtccctgccttctgaaataaggtgatttttgaaaactgttgactgtggtttataatttaaggttttatgttgtgtgtgctctggtataaggaaagagtacatacagacagggatgggagatgtagtcccagctctgatcctcaccctcccacccccaccccctgtgcagactgctcctaagtcaaggactagactgctggctggaagctgctttttcccagaaagcagctttatagagcagacttcatgtgacagattcatttctggttcttgtttgtaccctttttgggagcacgaagcacttatagttaagaatcatgacgctcttgagttaaagggctaacaaaaccctttctcgatgtgcattagacactgttaagctgtttctagctcagttccctggaaagctaatgaaggtggaatgtcggctgtgtcaccaagcaacctcactccgatacaaagctatgataggatgacatttgattggcaagctgagtctgcaccgggaagaactataaatatctagtgagaagcaatagtttgggatgtttaaaagtgagagatctcatgaccaagtgtgccctttgtaaggacccagaagcttaaagtgtcagagaatgctggtgtctcttgggtacatattttctaagctggatggctgctccatctacacatactggtctgattctctcacattaaagctgtcattgaggggacagcaattatctgtgaagctaccgcaaggattctcaatgggtcctgactgttatcacagcttctccagggcctggggcaggaggatgtcaagttcaaggcctgcctgcatgcacagaggatgcccgagacagtcctctgtggctgtgctgtgcttctgtccctttctccttttaaatcagtctgctaccaccgtggcccttgacgcttgggacttggatcctgtaaagcatcacctcagagtggacatcccagtggtgaagtagtcctgccttctgtttgtctgtaagtgtatcaagctctaaggagagaaccggctttgttttccaagtttgtccagatctttgcattctaaaaatgtttaataatgataacccttgccagccccagatctctacctctgtgtcatctcattccatgtgactgccatgatgctttccctcctccattctgtcctaattatggttactgttgctgcagtgaaacaccatgaccaaagcaaactgaggaggaaagggtttatttggcttacacttccatattactgttcatcatcaaaggaagtcaggacaagaactcagatagggcaagaacctggagtgaggggctgatgtagaagccatggaggagtactccttactggcttgctcctcatggcttgctcagcctgctttcttaaaggaacccaagaccaccagcccaggaatagcaccacccataataggctgtgctctcccccatccatcactaattaagaaactgcccttcttgactctagctgcatatgtaacaaaagatggcctaatcggccatcactggaaagagaggcccattggacacgtaaactttgtatgccccagtacaggggaacgccagggccaaaaagggggagtgggggtgggtgggtttgggggacttttggtatagcattggaaatgtaaatgagctaaatacctaataaaaaatggaaaaaaaagaaaaaaaaaaaaagaaactgcccttcagctgggtcttacattggcaccctctcagtcgaggtccctcctttcacacaactctagcttgtgtcaagttgacatcaaattagccagcacgcataccttcacatcctcttcctctctcacctctcctttcattccccctttccttcttgggtggtctcttcaacacacacaatggacagatgattgtgtgtacctgcagtgtcttggggcgagtactgcttcattcccagtactttccattgtgatggccaaggtctctgtgtatttctgacagacagctaacccagagccagaaactccttgtggtcacagatgtgctgatgagaggtctttgtgagctaacacaatttcagatgctttagtttggaagctctttgcttcttttctccttgtcttcatctttgctcttcttgcacatttgcatagcatttgtatgtcttaatcttcattacacaacaaacctctgaggtgtattcagtttaatccttgatttgcagataatggaacaggtttagaaagctccctttgctcacagacaaacagtgaagaaatgatagagccagagctcagggtcagatgctccaacgataaggcccggcctgctccccagccgccctctgcttctccttgctatgcctctccattccctagaaccatgtgaggtaacagtacacacaacctgaagctcttactgtttcccctgtccttcaagctcggaccgtacagagtcccatccatatgtatcgcagtagtgtggaaagagaatgtctctgcgagctggtcctggtggctcaagcctgtgatcccagcccttaggagcccgaggtagaggatcacaagttccaggccaagctgggctatgcgccaaaaaggaagaagcccggacctgagggactttatcctttgtaaggacatattcaagccatctgcagatgtaaactctagccattcctaactctgcattttggaaaggatgcagagcagaggggaacgagcagtggccttgctgccgagcacatgcatggaaacaagcagggtgagcattgggccgcgcagtgcttgcttgcctgttatggggtgagagcaactgtgcagtgactgattcggcagcatacagcttttcagttcacaaaatccacttcctatcgagagcactctgaacacacctgaacaggcctcgttaatgacgttcgatgctgatctcgctggctccttctccatcccctggagggagacagtccttggagagaggggacacggctggtgtgaagtcaccctgccacttgaatccagctcttgtcactctaaatcccatgtcctcaacatttcctcggagaaacctaaggaagtctcaccatgagtaaggtttccaacaatccaacaaccctgttagatgctgtaatcagaaacagtcctgagcacagtgggagtccagcacactcaggaccccggaagctgtaccagagcatccctcctctttactcttttgtactttacctctcctccctgaatacggagccaggctcggccaaccttggctgctgtaaagggttggaggacaggaggagtctgctgttagctttagctgatggagttgagaactggtatttttcagtaagattcggtaatggctgagtagctcaggtgggaatggctgtccttgagcacctttaatgtctgctaaaggaaggggatgtgcttttcagatgcccagatttacatcacccactgaatacagtcttttctgtccaggacagaagacggtgtcatctgactgaattaaggaacagaatagagcagttaggacaccattacaatgaagacttgagtaacttcctaagtagccaaggcaggaaatgcctgaaagaccatgctaatctctgcgtgacgagtttacagtttacattgtgtttctggtcctgaccatcttgctgcactccagaccagcccattcagccgtttgacagtcccacaaatactcagttgatcgaatcataaacgtttattttctccaaagagtgaacacagggctttcttctcttcagtttttccaaccacagtaaattgtgtcagtatctatccagttgtttaaggggggaagaacagtgtcataattggggtttcactgctgtggagagacaccatgaccaaggcaactcttataaaggacatcatttaattggggctggcttacattttcagaggttcagtccattatcactgtgggaaacatggcggcatgtgggcagacatgatgctggaggagttctgcatcttgatccacaggcagccaggaggagactggatgtcttgttttgtttttcacactaggaggagcttgagcataggagacctctaagtcccccctccacagtaacatactttctctaacaaggccacatctcctaacagtgccactcccgatgacactacaaacatttgagtctgtagggaccattcctgtccaaccactgcaaggaggacaggggaacgggagcaaactggaatggaagttggaagtcgagatttataacgagtggttaggaagctctctgaggaggtgcatttgaagcaagacttggagaagggcatagcgagccctgttgctgtctggacagattgctcaggctgagaacaggggtgaggtgaggtgagggagaattgtttgggaaggaatgggagaggatgtgtcgagaagatggataaggccaggtaatagccactcctttgtcagaaccctctcagctccttaattaaagcgagtggagaccttctatcatatgataaactatacctcaatatatatactactaaaaaataaaattcatgaaaggggttctgcctaagatgttgaaagatatctactcagcaaatcaaatgtataggaggttttttgttgtttggggctgggatgggttggttggtttatgtttgttttgtttttatatatcagggagctgaggtcataggcaagcaggatgcctggatctccagaaagaatagacacgctctcccactattctctaaattaaggtgagatgccagggctgggtccatgtggcacagcatagaaggactagaccactgctgtacaagtgaatgaacagaagccaagttttgtctgaggataaataagaatagcctaagatagcatgcaaaaccccttgtgccattagaacacttggttactaagaaaaatggaagaaaacacctatttgggagaaagtgtcaaaagactgcattatcctttaagaataccattagagctatctgtctgtcacaaaactcaccctagggttatttggctgccgtgaaaagggggaatggaaacagggaaaatctcacactggacccttggcatacaatctccttaaagtcatagtcttaaagtagcagggccagggtaactgctttctgccactagcctagcaagcgctaagtcataagggatggctctccgctgctgagaaaggatcaaaagcacatacacggataaccaaaagcagacagggagcaggtgctgctgtcagaacctgcagggcctaagagaaggctcattaccattggatggtgcagtaggcttgttaccatcggatggtgcagtacactgaaaggagccatagcaaccaaagtctcacatccagtcgcatccagcttaccctctgagtaatcgctcatcctcaaatctggcccaccgtcaaggccacctcggtctctacagctctctgcacagtgtccagggctcaacacagtgagattcccaccccccaaaaatcaagaaacagcagaatagactcagtgagtgattcagatgttaaaactctcagccaagcacttacattattatcattaaaatgaattatcattattgataattgttatattttatatgtgacatatattgtgtataatatataagattatattatagtatgttatattttatattataattatatgtaatataattagtcataacaattgttattgattataaaattataagtatcattacattaaaatcattaaaatgtctaggacaactatcaagaaagtatgacgcacacacaccccaccctaatccagactgaagtgtggcttatacagcctgtgaacagatatcatcatctatagttttaaaaagaagaatgtaagagagaccctgcattctgactcacagagcttgggatactctctaccttgtcctttacagaaaaagcttgccaactcctgacctggtagaataggtgacaatgtgtataaactgctagtaatattttcccttgtatatcaaatagaatgctgtgccagagaaccacgatgccgggctcgtcagtagtcctgggtgtagccaaggggctgaagatgagacttttaaaaacagatcactaagagtaatgctaatgaacacagtaagaaaggagtggaaaatgagagtggaatacccaagagctatgaggtgacattagacagtccaacatccgtgtaattggggtgtgtcagaaaagagaaagaagaacagacctaagaaacaaaaaggcatcaaagccacagatccaagactctgggagcactccaggcagagtcggtctgttgaacaccctcacactctttaaatatctaaaatgtaaagaaaagaaagcatacagacttgcgtgcagttaaagagcagcatcgtagactcaagccttgagaacagaggaaggcaaatggtaacagaagtctcccggtcagaaactgagacagtgaatggcactttaatgcaatggggatgacatcttggtagcctagaacctactccacagagaggacagagtccagaaacatgtggaggtgtggtcagacagagaaagcctgctgctgttagatacactgtaggagtcctgcaggaacttaacccgagcaaagagaccacacttggcaaaaactcggctctacaaaaagaaggcaagagttcccaagtggagagtggagacgccacagggttgcgcctgacttcgattccctagcacccatgtaaaacccagatgtggtggtacgcacctgaagtcccagccctggggagtggcagagggtccatggggctttgctggaggcctgacttgttttctagaacacacaaactctacagagttgtcctctaacctccttctgcataccatagcatgtatgtccacaacacacatcatatacacacacaggcgtggggggtgggggtggggtgggtgtgcttttaatttaaaaaagaaagaaaggaactgagatgaggattgcaagttccaggtcagtttaggacgcataatgagaccctagtttttgattggttggctcattgaattgtttgttttgaaaacatatttggtggcagagcacttgcctaatatatgggaggaaagccctgtgcttggcccctagcaccagggcaggggatttgagtcacctaagtctgagctccatttgtcacctaagaattggagacatagtgacactagaaggagcgctccagccacatctgacactccatccgctcacagctctttcatccgtacataggaagagatttttatcagcctcatagagtcactgtgggcatttgataaacagtatagagagactgcaaataaataaataaaatccacgtggctaccctgccattctcctggtgacacaagaattcatcaatggcttaaagttcatccagtgtaggccacagagggaacaaaacagacctgtcatcccagctctgtatttggttaagtgacatgtgaaaactcctgcttcagttgtgtctctagtatgagtggtgtagcttccactgagctttgagtgtgagcactttgctgtcttggtcagcaatcccccctgagttgcactagtattccttaagatcataggagggcatattagagcttcatttattcatctgaaaataaagagatttcgtcttactagtggtattgacaacgggctggcctgagttggtagtagagctcttccttgataggatcagctctcacagtgtgccaaggtgaagggcaaaactctgggtagtctgagggaaggaaggggaacctcagttcatggaggaggagaaggaaagaaaaaggaaggaagaaagaaaaggtaaaaaaaaaaattgtgttcctctaggatctggattcagttagagaaatctttgaaagctgtcatatttatcccccaagttgaaagaaatacagtaagatcagcacatgtgacaaaggacagtgcaaaattgtcatctcctcctagagcaggtgccaccttgtgaagtagaagtgagactcccgtgcaatctcacaagaactgggtccatcacctgactaggaaggtgtctgtttggtgctctggattaggcattgagtctcccgggagtggcagcacatacctttaaccccagcactctggagagcctgggctatagagacagaccctgtctctacacaaacagataagtagattagagagagggagagggagagagagaggagagagagagagagatgtatcaatggaccgatggatgaataagatgagtcaactctctccttccataatacaggtttccgagtagatcaccaggcctagcagcgagctcctttacctacggagccatctcgacatcccatgcgtgccttcttagcctcactttatgctcagtggttaagaggtccggctgctcttgcagagggccagagttcagttcccagcactggtggctcatagccatcttgcagatgcatgcagctccaaggaatctgataccttcttctgtcctccttgggcatgtggtacatgcaagcaaaacatatgccacagaatttttaaaagaaatctcttactagctaattctgcatgtagcatgttacataatttataaataaataaaacattgcaagtatatacttttttttacaacttgtactcacagttagtcagtaaagtttgagaatgtctgtctgtcctagcttctggttgactctcagaaggcctgagacatcagttagagggtccctgagcaggcccagggcggccctggtatttcacgaggcttctgatgatctgatgtatttggaagtcactctgtaaatatacaaaaactgtaagcctcggctgtccagtctgggttttagtcataaactaattcattgggtttttttacttcttagaattctattttcaacacgtgttccttctcaatgattttgactaaagaatttaattttaattaatttaatttgtaaggctaaatcacaagaaattcaatatttatgcatttttaaccgttgtgtatatctttgctgcatatttaatttatttttaatttatcattgtgtgtgtcagatatgtgtccatgcatgacactttgagatgggtcccagagattgaactcggatcaccaggcttggacagcaagtgcctttactcgcctagccctctcaccaacccttttgtatactttaagattctaacaagcctttggtaacgtgttttctctttgtgatgtgcctgtcgccagtacttagttccctgtataataaaatcccgtcatatgccttggacactgtgaacagagctttaatcccagagtccccaaaaaaaacctgtaattgtgtttaacacatatgaaaagccaacctgttgtgggcaaaatgagcagtttgtaaagtcgctggctgccttatggtcgctccttgcctgagcggagaggtacacacttgccgatggccagagtagtgtcttctcccagagtggaactgttcctgtggcatttgcacagcatggcaactgtctactaaaacagttaagaaaaatgccactactctccaagagtaagtacttatgagagatatttcaaagaaaacatgaaaacgtttttttaaaaatttgtgttacgtattttacatgtaaaatagaagccatataggaaacaaaaggaagaagttcaacattttaaaatcttcttttacatattttttgggggaagcacaaatatggggatcaggtgacaactcagagaactggttctctctctccaccgagtgggtctcagagatgggactcaggtcatctggcatggtggcaagagcctctacggctgagctgtctcagcagccggctgttcagcctttggaaacatgtgtacattttagccggtctgagtagagaggtcagcagtcttgctgatctgcaacactgtggatgtaatagcactttcctgggaacctcctacggcattctttgtggtttgctggaccgcttggttggcatggattctgcagaactcgggcttgaacccaggacttcacataagctatccgtcgttaagacactagctacacctccagtgccactggcagtggccttgtgttgactttggtgtgtctgtttctgtttctttgtgcatgcgcacaggtgtggagaccagggcaacctctacaccttccttcaaagacaacacagcactttccttccttccttccttccttccttcctttcttccttcctccctccctcccttccttccttcctttctcccttccttccttccttccttccttccttccttccttccttccttcctttgtttttgttttgttttcttttcctgagacagagtcccttagtgacctggaattcaccaggtacagtggtctcgctggccagcaagtgccaggaaccctcttgcccctgcttctctggcattgggattattatcacgggacactacttccggatttcttatgcgagacccaggaactaaactctggatctcgtacttgcaagacgatctccacccatatgagacccctaccccacgacctttaatttccaattagaaatttccagggtcctggactggggctgtgttagcattttgctgcatggttcaggctatatagtatcgccagacggaagcttgctgttgctctccctggtgattggcgctaagaatgctgcagatgagttgaaatcatagatagttcccagataccattttagctgttaaggttcttttcctacatgccctcttctgggccctcatgttaagcttggatttgggcacactgaggagtctgccttcccttcccactttctgctcagcaccgctctaacacaaagaataaacagaaaacagagctgcatggaaggcggccggataaagcctctcaactcacaggatggccagccaccacgatcacagggcagactcatagttgccatcaaaccctgtagagaggccagcagctaggaggtcagataaagcgaggtccagatcccgtaaaagcggaagaaggagggcttgcctttgggtgagagggcgtcaccgaaaatccatttccagcaacttcgtggttcaatctatgcctttggtgtcatgcctgtaatcctggctgcttgggaggctgagacaggaggactataagcattattgataaataataacataggggcaggaaagatggctcaggggttaagagtgctggctgttcatgcagagggcctgggttcacttcccaacacccacatgatggctgacaaccatgtgtaactccagttcctggacatctgatgccctctctgacctccgtggacaccaggaatacatgtaccacacatgcgtatatgcaggcaaatcacataaaatcaaacaaataaatatttgtttacatggctctttctttacaggtgatctccttctttagctcaagacttctacaagctggagctgagctgtcggtggaaagggtcttggaaatcattaaacaaggggttgtggcgctgcccaaagacagactaaaggtaagccggctacagaattgcccgtgacactggctgttggtcactcaaggcacatagagatcagcatccagcaggcatgactcagactggtactgctcaccagtgctcatgtctgagaggctaaatattccctctgctgtctcctgataccaaacccgcagttcagtagagagtagccagatatgcgttcacatcgctgcacaccccaccagtaagccctgcacactccatgagaactcatagttaccgggtatatttttaatcctgtcaaacaaactgatgccatacaaacatcacaaaaggctaatgggcaggcagcggtgatggcgatgccaatactgtggtgtccggtgtttgttagtgcctcccagtgtcatgccgggacctcagcctctgagtgtaccacctcacccgataccctccctactcgagcagccgctgttaacagctgaagtcgtcaggtgaagagaccagcatggaaagattcatttccctagagcattccaaccaggaagtgcttgagctgagtcgagcccaaggcagtctgtccaaaggccttgcttgtggtccattactgcttactgtatgccttcgtacagtaatgggaagaaaagtacttcgtgggaaagggggagatgctgcatctgacgaaaatactgtacatctgtgtggcagaggcactcctgaaagggctgaaagtccacgcctcagacctgaccccttagggcagtgtttctcagtcgtccctgtgctgcgtctctttaacacagttcctcatgctggggtaacgccatccatacaatgatttttgttgctacctggtagctgtaatcttactactgttatgaattataatgtaaattctgtgctttctgatggtcttaagcgacccttgtgaaagggtcttttgacaccacacacctcgcaaagtgtcatggcccccaggtagagaagcactgtctcaaggtgaggatgtttcatatgtcaaagaagataattcatttctcaacttatgatagcagagaacatggtaatgtctgtaggccagaagcaaggcattttgctgcaagcacaggtagcttgtaacgatgaagaaattagggcagacattaagcagaactgttgcccatccagtggtcagtggtgtcgtgaaaacaaacctgagaaaggcgttttcagctcggcatccctaacctcctctctagtctgcttctgtggcctcctgggctacagaggagagccaagatccttgcctctcctagaatctcctctcccccaggagtctaccaaggccgatagagcgttggagggcaaaagaggggaagctattctccagagacagacagacagacggggacacacacacacacaagcacacaaacacacagagcttttagtcagctttccgttactgtaacaaaatgcctgaagtaattaactgagatttgttgtagcagtttcatcctgtggatcagttggctctgtttctttgtgctagtcaggaaacagcatgttatgacagaagctcgtgacagaactgagttctgtgcctccttcaaagccagggaacagaagaaaaaaaaaactggagtgtcccctcgtaacctgcaaacctacccagttcctcactgtgtttccacttgcgcatctgccccacgagcaggagaccagttcctcagtatggggcctttggagaacatccaaactgcagctcctgtctgcagtaggtggctgaggttgtcagtggcagccagagatgctgacgtgtgcagcagctcacccagagctcttcagtgcctctcgggaagtcctgtggacttgagtagcttctgtttaccctatcaaacctgtctggagaagtagaacccgtgatttcagtagatagtgatttaatatagaagctcaaaatctcagagaagcctgaaggagcacagcgaaaggaagccacagaagctgccaggctgtccccaccagtgacctgggttgcctggagcatcaaagtgggggtacaggaacagctggccaggcttcagccaaagtcttgacactgggtttcctgtgccgatgagggtaaacacgcacatacccccttcattgccatagcctaaggctaagccctgcagagccctgctgggaaagtcactgcccgactccatagaatgaaaggggcggagagtgttcagcaacaccaccaccaccccagacagtgcagcacgaggtctgtctcaggatgctgtaacgcatcatcagaaggagcagcgtgagtctgctcagacagctgcagactctgctgggggttttatgaatccaaggagccaaggagcaagctggggtctctagtccagaaggagaggacaaggttacagttacatacccatgtgtcctttaaacaaaattgaagttcaaggtaagtaaatgaatagcaaaggggttgttttgtgggttttttttttttttttttttttaccgtattctgtatttgacgtggtaaatgtacatacttacattttagtgcaagtgttcatgtatggggtcagatcagggtagtgacgtatctgccacctcagacatttgctgtttgttctgggagcattcacaaattgtcgctacaagctgttaggaagtgttcacttgattagtgccaaccatagtaattctcctctgctaaacatggttcaccccacatttccatcagccatcgtcctcctacacacccttgctgggctatggtaagcactcttctccactccgctgctcggcggtagatcatgttgtactaccacatattagtgagaacatccaatgtttgtctttgtgtgcctgacttctgtcttccatccatgttgctgtaagtggcagcattatttatagttgagtaatactccattgtatatgtgtaccatatttccttatccagccactcatccacagccaatcaacaaggttgattctgtttcatgactatcgtaaagaatgagaaagagaagggcaagtgactgttttatatatgtacctgtggtggtttgaatcggagtggcccccatagactcatatgtttgaatgcttggctcatggggagcggcactcttaggaggtgtggccttgttggagtaagtatgtgactgtggggatggttttgagggtctcctgctcaggctagtggggcagtctcctcctgctcctgtggatcaagatgtagagctctcagctcctcctccagcaccatatctgcctgcatgctaccatgtttcctgtcgtgacaataatcgactgaacctctgaaattgtaagccagccccaattaagtgttttcctttataagatttgttgtggtcatggtgtctgttcacgcaatagaaaccctaactaagacaatgccaatactaagattgtcagatttcttagttagggtttctgttgctgtggtaaatctccattatcaaaagcatctcggagatagggtttgtttctttttacagcttgtagtccatcatccagggaggcctagtcaggaacctagaactggaggcagaggctgatccagaagccctggaagactgccccttgctggctggccactcatactgcctgctttcgtagttacacagaaccaccagtctaggaatggccccacccacagtgaactgggccctcccacatcagtcagtcaagaaccatgccacaggcttacccacaagccagtcctctggagagtccctcttcccagctgactctagctgtgtcaggctgacatcaaagtgaccagaacactgagtctatttctagttttcctggtatagtctctgtactgatttcttccacactgtgccagtctttttaatcttttgacactgtttctcacatttctggcaaatgtaacttgtcagtaaattttagaacttaaattccacagtaatagtaatgctaagatacttttctaactgtttttatggctatgagttgttcctgttgtcaccacagctttctagatgatgtagctaagacctcaagacattgagtaatgttcggatacaaagctgggcccagctacatgctaaaccaaagcagcctttctccaggcagtgttttcaccctgtgctagcctggccactggctatggtttccggacgcatgagttagggttagtgtgagattctatttggtattatattagtgagcccaagtgtgagccagagacgcaggtgtggttacggtgaagagcctgtgaatcacgttaagtgaggagggagagggtcccgggagatacctcgagcagccactgcaagcattgtcacaggtgaatcaggcgtttcatcttcagggtggtaagtgagccaacagaactcttattcactttaagaaggtgtgtcttcccagccacttcctgagacatacctgcagcaaagtctgggggcacataaaaccatccggggccccgggggctcgaatcggtggcaggggagagctcagggaagacgtcctgtgggagcctggcaggcggctccgttggtgaagctgcttgctgcacatgtgtgaagatccacagcagccatgtggaaggctgggctcagagagaagtctgcaaccccggtgctggggtggaggacaagtggaccccagagcccatcggttagctagtctgaccaacttcgtgaactccagattcaacaagagaccctgtctcaaaattaaggtggaggggctggggaaatggctcattggataaagcacttaccatctcaatgtgaggataggagttccagtctctgagacctgtgtaaatgttgggtgggcatggtatctaactgtaattacagcatttacaaagtgtcagagcagttaagtatccttagagcaagctgtctacctagcctagctatgtcggtaatccctgagttaggctgagagaccctgcttcatgagtaagacagagagcagaagggcagaactcctgatgccaacaccaccatacatttgtatatacaacacacacacacacacacacacacacacacacactcacaaagtcttacgatggaaggctgctcagatttataccaaagatttcttctaattcttagagcctagaatcgtgtcttttctgcttccatgctgaattctgtagagcagagccctgttcccagcagataaagtctaaagttactctgggattctagatagctcatggcccctaagcctccttgcccggccttcttcctccccatcccccttgctccaggcagctctgcatctgtgtccttccctggactccctttgtgggtttgctcctacggctctcatctggaggtggcatcccttttaccttggccagtcacttagtcagatcctgaacatcccctcagggccccgctgaatttcaaaggatgcctgaagacttcccttttattcttgtatggctgtgtgtctctcagtaaaatgcccagagcactgtatccccagcatctcgtcctcttctgccctgttttaggtatttaatgtctttcccctccacagtagctgatctgcagccccagctgcctagttcagtccatgaagtgggtggaggggtgagccggctgtgtgtactctgtgtgggaagtggggggccgttcccatgcaggaggtgagaagtcaaaaattctgtacctttagatgttcttttcaaaatgtattctgccatcttctagagtcttaatacctgtaactgcctccccctgttctccacactgtcctagccacgatggctacagcagaggacaagaaaacaagccctgctcccatcgaacaggctgtggagaagactcactctaagttaaaatgtaaaacaaatggctgtcttagaaagtagtgactagcagagaagtcaagggcagaagagggtgggcaatgggtgggggggttgggaagtgtggggacggggtggggcggagtccgtggcagagtctgtgctgttctcgttgctgctgtcattgtgtgttttatttttacggaatttacagttacagaaaagtaacataagtagtaggcgttccaacttaaaggcagtccaggtaaaacgcttcctggatctatggccaggcacagtggcacaggtctatgaggagggtccttggtgagctccacatgacagagctgttctctcacaaatgaacagcgtctttgatggtaacaccaaggttatgctctggcttccacacgcatgcacatacactaacacacatatggaacacacactcacactggtgtcctacggttaagaagccacgcctcccacatgcttgtcattctctccctgtacccaccctgctctctgggagcctccatgttacctgccctatccccttagtctcctctttcgtggtattggtctgtattgtattcaggttttcccggtactttctcctggttctgttgaagttgcttgtatatggccagagcctccgaagtgttcacagctgtcgggagtgtggtctcttcaggacacttctcctgaaggtctactggcatctccagtgaagcgaacagctgtctgttcctttggaaatgttagatgtctctcctttggagtcttgccctctgatcttaccatccatcagcaggtctggctgacaacagaggaacgaccactgtgctcatttgctaaggctgactctgtaggttttagttcagtgctaacatttgtttatttttgcccagatttctctagctttggccagtgaactcctggggttgatttccttgtgctttgccacaccccactttgtggactatgtggaatgctgcaaattagtctcgtatcttctgtgccccaggttccagacagagctgggcgctcagctaccttttgccagaccattgcctcctcccgctctcccattaacagctaatgcattgggttctgcctctgccctgcccaggcacctttcttgtttgtctcttcctggtatgccccagctcctttctttcacctcacccttactagctgtgtccttggtcccttctgacacagcctgatctgttttctacttcttttaataaacactctttgcccaagaacccttccatgggccatagaaaatagagaggcttgacctataatattgaccttagagcaaaatgaattacagagtgcacgccacaatatgtgaatgtattgtctttttactgtactgtactcaggaataaatgattctttgagacagtcacatatacatggaaatgcagccttttatggttatggccagtagagaaattagttgatctttgggggttccagagaagttaacccttgtttagagtaatatactattaaggccaaggtcacacgtaaatcctttaagtcagacaagtagttttgttctggaacataggggaaaaaaatgtacccctgggctcaggctgcctgcactctgtggttatagaggttggaagatggatggctccgtttaaaaacagaaaacaaaacaatccatcacccgcactagaggggaagccgaagttacatttcctcgcacgtggtgagtcatgccctgttggtctaaatgagaacctgtcattaccacaggtgctgctcagaaagggctgcttagcttcagagccgaggcatccctccattgctgaatcatttttagggttgagtgtttataataaaacaaatcacctaaaaccttgagagtttaattctcgggatactgcgatgtgtgacgttgactggaaaggctgtgtgcattgaatagtcttggtataccacatgcgcgtgctccgagtcatttagggtcgttggcaatacaatatcggcatacatgtgataggttagtaggaatagatttccaaatggaaatactattttaataaatgctatggaggtgtaaatggtgtctacatggtggtttatcacatatattaaacactaaatttcagttttttgacgaccttggcttaagagaaccatagaactcaggaattttctcatcagctaggtagatgagcttgacgttttgacattcttccttttattgaagaatgaaaactaaatctgtacaattactctcccaatattggacaagtagactctaagatctagagcacggtaactggcattcaaccaagtaagatagttttcaatcaaatgttactgggcatagtcttctaaactatttgcttattagtgtgtgggggactgcatactcattggctaaatctgtctatacagttaaacaagcgggctggattaacatcagcctacacgttctcttcactagtgttccatgagaaaggcagctcgggctctttgtggtctccggacctcccatgtaagcaagagactaaacagcaagctctgaaatcctgagttgctcgtttctcttctagggtttaatagacataaagttagtatgcccttccccagccacatctgcagccatggctcaaagctctggggctctgcatcctcggctcggcagggccctggctcccattttgctggctgggaacagtttgaacagactgaagggacagaagtcatccggccccgttgtgctcactgccactacagcttgtatatgagtgtgtacggttcctggttgtccctgtcatggattcagttaattatctgtgttgttggaggattaagaatgtaacctaatttgataattaggtgatattttcaaggaaaatgcaatcagaagataacttttcttttagggcaaataggaaattgtggagtaacttgataagtcgtaattaaaagtggtagccagctcacactaaatgaagttactttgtggggtggggaagtgtttgtttgtgtgagtggaccacagtgcatgtgtggaggtcagaggccaacctcaggtgtcaggcctggctttcttccttgtttgagacagatttccttactgtttgctgatgtgcacaccaagtgagctggcctctttagcttctcatgattctcttgtctctgcctccatcctcccgggagattcgacacttagactacttgtccagccttttgctggttctgtagcctgaactcagttcattgggcttgtccagtgagctctttccctgccaagcaggctccctagcctgtcagtgagttttaaaagtcttcatttttttaaatgtaatttttagaatattttcattgttgtcattaattgcataaagagcgtctctaatacacacacaaagttggattgatttgtctggagggtatcttattaaatttattcatctgtgagtgttttgcctacatgtatgcattgtatgcttatgggacatattttatagatttttaatatggtctttaaaacttctttttcctcctgttgagaacctcttccttctcttcccaaatgtcacttctgccaggtatctgattcctgtaatggacaaagtacattataacttatgagtgtggtttgactgttcattctacccacactagtcattttacactgcatgagcacagtggtgctggctatcgtggaggagggaaggtacatacaacctcaggaggccccaggagagccaggtacactcaccagaggtgctaacacaagggcagttcactttgtcagatggtagagggggcaagttctggaaagaagaggttactggactaggcagggagaatgaaggcgagacaggcttgaccttgtctgtcttgaaggattggaaggttttcataggccgaggtaaagaagagtagcttgcaaaggaaacccgtgagagtgagggacagtccagggcactgtagcctagtggccaacagaatgactcatggattcccctgccaagtcagtgtggcttttgtcacttgatgatacaattatgtccttagactagtgcttttcaaacttttttaactgtcactgccagttacacacacacacacacacacacacacacacacacacctgtaccatgtgtagcactgtactcatttgcatacaactaaaacaaatttgtgtaaaacagtactcattgagtgtactggctggttttgtgtgtcaacttgacacaagcaagagtcatgagagaggaaggagcatcagttgaggaaatgcctccatgagatccagctgtagggcattttctcaattagtgatcaagggtgggagggcccactgtgggtggtgccacccctgggctggtggtcctgggtctataagaaagaaagctgagcaagccaggggaagcaagccagtaagcagcaccctccatggcctctgcatgagctcctgcctcaggctccagccctgcttgagtcttgccctgacttccttcaatgaaggactgtgatctagaagttaagccaaataaacccttttctccccaatttgcttttttggtcatggtgttcatcacagccatcgagaccctaactaagacactgagtatgatgggctcatgaccctgtatccttttgaattgatggccaggcctactcaatggatgtaaaggctggctgctgtttagtgtcttagaattttcaaaatccatgatagttttaaaatgtggtcttgagaggaaaggtgcatctccatcctctgatttcaaaatgcagatcttcgggcttcatccagacctgtggcccagtactgctcttgccaaagaccaagttcagtttccagcagccacacctggctacgtgcacatactccacattcaggagaggttacaacactccaagttaccattgctgcactcaggaagaaatgattgaggagggatggcttagttaaggaagtgtgagtttaagccctagatctgcataaaaagttataaagtaatgtatgtttataatcccagggctgggattataaacagtcaagatggtctctggggtttgtatgcccgccttaccctactttagtaagttctaggccagtgaaaaatctatctccaatacacggtgcagctgtggggatggcacagtgggtaggagcacttacagcacaagcatgaaagccggggttcagtcagattccccaaagcccatggacagagctgggcatggtggcatacacgtgcctataagcccacagctgtgcgcatatgaagacagcaggatggctgggcttggtggccactgaccaagctctgggttcagaaagatcctgtctggagggctagagcaagacacccagcacccttctgcggcctctgtgccacttcttctaaggaaccacacccaaagctgttctcctgccttcacacataggtgtacccacaaacacacaccaaaaaaactcaaaggaactggctagtgaatgaagtcaactcctggggatttcagcaaacacaactacatatcaattccatcccagtaatttctgagagcaggacctgctggagagcatagcagaccattatgatatgaacaccagacacacggccatgctgccttgtctaggaacaaggccagtgctgctggtctctagccgtgaggcttttgagagaattctatttaataaagtcacttagagttcttctaatctcaggtttgcaacgccctctcggaaatcttgatgacattttacattttgagagacccctcccacatgatctccacttctctgccctaaccaaaactaggggcgtgaaagctggaccgacagacagccttatggactgacacacagatggaattagaggtggttcagcttccttcccacaatagacacctattgtaattctcgctccctcttggccacacctatttcatcagtgagctgggcactatactcttgtaggttttacttcctatttcctttgacagaaaactcagtttcccaagtccttccctgccatttgtaccacttatatcccatgatgccctatgtgggagtgtggaagtatatgtgggggtggggggtattcatctcccttcatcctgggttccctggtgtgttgtctgtttctaaccccattcttacttctccgatacactgccttgcacagaagactcactaaatactgctgtatggttgaaagtcaacttgagaattaagttactactttcagatatggtaatctgagaatcaaccaattaaaagcctccaaagaaaactgctacagtgtgtgaacaaataactcaaaggaactggccggtgaatgaagtcgactcctggagtcggcactcatttagaagggagatgtaggctttatatgattccatttcctcagcttttatcctggaaccaagtatcatccaggtagtcacagcagggaaaggcaattgctcttaatgaagaactcagactctttctggcttaggaaaccacaccaaggtcagcctgagagagatggatgccgtggagagaggtagactcccaaaagtcagccagacggatcccagattgtgttcctccagatgtcaccctgactcctgagcagtgtgtaagacactgacctaaaacagccatgccaaaggccagaaatgtgaagtagacaaaaaagtgcagccctagagatctggaagagtgaatctaggcacagactcaagaaggtctgtcctactgaaagaggggaaacagcaagctgtgttcttgtctcttttgtcccttttgaaagcttggtctaactgtagtccgtgcccacacagcagaatcagggaacacatgggaaagtggcagcctctctggcctagagaatcattaagggaaggaacatagggtctgaaaccctaagaatcatggaggaaccacagaagagaaagaggggttcctaagacccacaaccatgactggaccgtgatccacacctgcagaatcagctcttatgtcccagtcaaggatgggggagggctgcccagaaaccagagcctgctcaaaatacggagactctcaacaacttaacattaattttattcaggatacagtccaaatttttccgacatcgaaagaatcaagaaaatggaacacattctctacataaaagaaaatcaattaagctccaccccaagatgaaccagatgttagaacttacagacaaggatctctgaagtaactcctaataacgaacgcttctccattttttcacatgacacatgtttccaatgcatgaaaatttcagtagagagatgagatgtctcaggcaagcattggaaactgtacacaaatcccaaatgggggaaagacagaggtctacagaccgaaatgctaatacaagcggttagttacgcacagggaacctcatgcggagatgcgctggcatcaaaacagttaacgagcgacacagacacaccaaacagagccagcaatccagggtagcgcgggtctgtgggagcaaacaacaactgggcggttacctgccctgctctcacgggtgaccacagggcctcaggaggctggggcagactctttaaagtgctgaaagaaaaagtgtgaacccagaattccctgtcaggtgaggagagctctcaggatgaaagccagctgaagactggagggaaggagggttacaggcggcgtgcctgctgctgctgtgtgatgctagagggagttcttagggtgaacagatgggaatttgaattgtcaaaaaaggactgtttgtaagaaatgataaatgtccaggttcctgcgagtttactgccatgtctgtctagttgataatgtttgtagaggaactgtatgtaaaaactacagaacaaaggaggggagaagagggatatgggcctgtatggttatgagtttatattgagtttatatttcacatatttcacaccatctttgtgaagattaaaaaagttacagatctgttttgtaatctatagcagccgatatgaaatcgtataaaaatgaataacccaaaagacaataaaatggctccgtaggtaaagagcctcactgtgaaagctatagtgaccagcgctcagtcctggaagccatgtgcaggtggatggagagagtcgcctcagagtcatcctgagttatgccacggcacacacccacccccgcacacactactaacaataataataataataataataataataataattcttaaaagccaaccaaaaaagtcgaactgtaaagaacacttagatagtatagggtcacccccacaaaggaaggaggatagaaatgaaggaacaagaaggcagctgaaaataaaatgacggatagaactacggtaaacagcagtagcccaagcgcatgcagaaggaagagttgtcacgatggatgaaagaagacagcaataagccacctgcagaggatgcaccttaaccataagaactggggtgaaagtcagtggaagaggggctggagagatggctcagcagctaagagcgctggctgcctgctcttccagaggactggagctcttccagacctcacaggcaccgtgcatacaagtggtgtatgtacatacatgtagacaaaacaaccatgcacataaaatgaaacaaaccagaagagacagaaagtaaatggaaggaaagatagaatgcagacaagtgagcaggaagccagtgtacccagcacatcacgtcagagcaactccggttccaagtgctgtgtggctgtggcaagtgtgcgtgtatggtaacacacttcaaaatcgtggaacaggaacattgacaggtgcgtggaacagatctgcccactctccttattggagattcgcatccttcccacagcaactgataaagaactagaccaaaaaatccagcaaagacatgagagatctgagcggctgtcagccacctccccctgattggcatttatagaacatcctacggtggcagaactcacttgattttgaatgtgtatggcacatttacctaagcataccctattttgagctttatgactaatttccgtaaaattagaatcatcaaactagaattagatcagaaatcgataaaatgccagaaaaggcagtgggtgacaggaagcgcatgtgcagggagtcagagggagtctgttagcacagcacgcctgctcaaagagcatttatcaggttcaacacttggaattaaagaaaatttgtttgttttctgagacagttttctctgttgaacagtcatggctgtcatggaactcactctgtagatcaggctggcctcaaactcaaaagagttcctcctacctctgcctcccaagtgctgagattaaaggtgtgtgccaccactgcctggcaaaattagtggattttgtgtggattagcggactttgatatgcaaagaggaggcttagaatgttttatcatgattccctaagaacccacagcctgggctctgaagccggagagctggcaaacactgcccaccaggaacgtggtttctctgcagggtgccaggtgcctggccaccgaagagaaaagaagcacgcgaggcagacaggtgacagactcagagtgtccttcctggtgtccttccccacagcccactttctgtaacagtagaagccgggtaaatcccagtctcaggggtgagtgctttacggtgagcagcgagcttcctacctaagcagagggatggcctgtgaaggagagctcagggccggcagcagcggtgcgagcctggcacgggccacccctgatgttccagggacgccccggcaggaactggtgtcagagtttcatagtaccttcaagggttattttcaaacaaaatacacacttcacaaatgtcttaaggatatgcgcactctgtgcttcataccgttactacatttttttttatgcgataactacataaaagccagatgtctccggagaaatcattttgcattaccgctgcctctaaacaaacagcccagcagttgctgcgggaacagagctgtgaattacttgaacgactgcgtgtttcaacacacgttcctggagttcgttttgggcatggtctctgcagcacgaggagtaaatcagaagtcggaagtgacttgtgtgtctagaagaggaacagcacgcagagtttccttaatatgtcttccagactcagagttaaaaacataatatttttcatgtgatctcggctgcactcacagtcatgtttaggagcatgtactcccacaagaggaaacacgttcccagagtgtgtcctgggaactgaaagctaagggcgggttgtttgtgtgtttgcttggctctgctgctgtattcagtgtttcctcagtgtcgtcgtcgtcagcgatggccaccatcaacacaggaaatatgtgctaacacgcgttgaagtgtgtgtgttggggtggaggggctagagctctttttagggtagatcagacctttgccagaacagagcaggaagtaatcactgtcctccactggaaagcacttcatggcgtgttttctctataaaacagagcaaacgccctttgctccttcagcctccctagcccgcaacctcagtcagcacctcttcttcccaactcgccgcagtcaatgtcctgaattcttcatttggagacgcctatggcactgcatggcattacccatgtcccccaccacagccccgtcactgggtagaccggacacctctctgtagtcttactcgtcatatcccttgtgagcgtcacaagaaaggctccagaatgtgtaccatgctctggaccccactggttctctaagggacatagctgcttattgtaaccatgcatgtctgtaaccctggtccttgagtgaagcctagagaaggagcgatgcggagatgagtcattgggtcaagtgctcactgtgcaagcatgagaacctgagttcggatctccagtgcccacacagaaagccatggagcgcacacctgtagtcccagtgcaggcttagggcagcagaggcgggacgatcccttgggtgtgggttaccaaccagccagtgtaactgagcctctgtcttcaaaacacgaaggagagccagcgagatgatcagcaaaggagggtgcctgccgttgagccgcggcatcctgatttcaattcccaaagcacatagtggaaaccgagctgtcttctgacctccacatgcatacacatgtgttgtgttcgtgtgtgggtgtgtgcatgtgttatgtatgtatatgtaaatttaaaaactaactttaaataactaggccgagagtgatagaggaaagcatgttgttcaactcctgaatgtacaaacacagacacgtgccacctgcccagtgcacaaatctctctcgaatacacacacccctgcctgcagagaagtgtaaggaaagatggtaggtataagggacaatcccacactaggtccagcttgtctgcagctagcgtcacccccaccacaggtcccattgcttggccctcacaggggatgattctggacttaacagcagcagcacaatcctagaaggaggaggagacgctgaggggcttccccttgctgttgatgagtgcctcgtgctgtggctgcgggcctgatgggacctgaagggtcttgccctggccgcctccccagtggctcgtcacagtctcctgcttggagccatgagcctggctacatcagagctttgctgaggccactcagcgtcgtcccctggagtcttccttgcctgcctccctcaccgcagtccccgtctgccttgggaatctgagactgtctgaaagcagatgcattcagaagaaacagagaccgtttggagttctcttggaatttattatataagaaactcatgtgttttgcagaatatttacaaggaacgggtctgggcattaattaaaggtctcagattcgcttttggccattaaactcagtagccactctgcagggctgtgtggactgcccttctcagattaggagactgtcgaatcctcgcccaaggaatgagtcctgttttaaaattgagccctttcgtttttccagttttgctcattttataaattttcaacactaagcacaattaatatacatgttcattattaaagttggaagtggctcctaagcataatggaagttgacttttgctctgtgtactacgccagcagaactctgcagtgtagtaggcaggcatcctcagctctactgaggtagctgctatcctcagttcacatgactgggtagcatctcactcccatgagttctgaataacccagaaacttcctggttctttggtcttttctttttgttatcaaattacttatcctaaataaagcaaatttaatactgactccctaggtctaagagtctgcacctctcagcattaccaagaatataaagtagaaattaaaaaaaaaaaatagtttgtggctacaaagcagtggaagtggatcctgtggcttcagaggaagctgcaggctgccacggttccctcctctgctctgtgcatcggtttactggtgaagagagccagctttgccctccgtggatcgctggtgcatcctgggtgctgtggggagactaatgagctgcaggcctgcctgcaccagcaagtcctcgagctccagacgcactctctttactctttataattaagggcctgaagccattatttcagacttcccctcctcctgccccgttgtgctcacttggctgttttatgggctatttgtgcgtactttctaagcaagcccggagtacacatgcaaaatctgtcagtttaacctctgacaggaaactattcagatttggtaaatacattttaagtgtatgcttttaccagttctaaattaatatgaaggtgttcttccttttttaagtgtaagtattatgtgcagaactatatttatgggaattggtttttagtttgcttaaacccaaagatactcattttcagcttcaagtagaaaaggcctcgtccttacggagggtgggtgttcacatttcagataaatgtgtttcaaaaaaactttgagggactttctattcctcagaactcctcagactttcatttgggactggatgaggggaggattaagttaaaatggtgaagagattaggcctgttcttctcatgtcgttttataggctggtgtttgcagccctgcaagttaaatgacaggacacccatgtggtgtcctttctgagaggagccctaaccctcctgcttcggctgagatagagtgggtggagcctagctgcttcctgttcaccgggctgtctggccccgcagtgataagcagacactcactggccacttgaaggagactttcagtaaagttcccaaacccacggccagctttctcctgtgaaccatttatttgacaggaaatgaaattggttacagggtttctcacattgccaaacctcactgacaaaatctggtttcttccagagcccaggagcagcgttaactctttgttgttagtaaacacgtctggcctctgtccatggagagccgcaacagtaccaaggggcacaggataggagtgcgcccaggggactggctcacagatgcccaaagatgacccctggagaatgggattttacttcttattggcacagtcatctctcagaataaagtgacattttcacaagactaattttttacttccaaaagtgaaagctttcaaccatgacacaaattaccgtattgtgaacagagcctggttgcttagtccagcaagcagtttttacactctgcgacgaaagtagaagaaacagaaataaataggcccatgtggttacagggcagagaaactacttgggtgagtgaaggttaagttactacaaagtgtataatctagttcatatgtttaaggaggaactaggctaaattacccaaaatattctgacgcatggaatcagttcgttttgtgaggcagaactggtggctcatagcatgccatggtaggctcgcctgctcggtgctgtctgcagctccagcctcctgggtttggagtcagcaggcccagaggtaaggcactgcatgcatgtggcagtcattaggatggtggaagtggttgctggctaattgatagcagtagcagcttgagacagccttatttaattttcaatagtcctatgacaggacgctataaatgggtcgctttgtagtctgactgactcccattgtcctctgtgtgccattaaatatgagagagttaatatatgcacttgataaaatttaggaatgagtttctctgcccctcttccctcctttggagtctttccatttgatgtttgtcctggttaccttggactccaaggtactccatagttactcccagtgtagcctgctgcccttgtctgccatggcgcctgtgagctacaaatgtgcttgtgatcacaaacccaactcctagcctgtgccagctggtggctttgctcgcgtctgagccacccaggctccacagagggtgacggagtgaatcactcccgctgtccatcactaggaggtggtaagctttgtgaacttggattgcgttagatcaccacgtccacggtttcagttgctgtctcataatgttacacaggctgaagtgggtggttaccttttctagaggatgatcttatttttctccgttccgttttaatatgtctacagcagaaggccgtatttttggaaatgaaagtgtagtcttttattaataacaggcattagaggaattcactaatggaaatgttcaaagaatgtgtctacttccttttcttatttcttataccccaccaccaccaccaccatccatgaaatagaaatgtcagtcttagcacttgtgtgcatttggcattcttcctgttgctatagatgcgaaaaataatagcaggtaggtcctaaaagctttgccttcatagctggtgatctgtgccctcgcccttgccctcaccctctcctgtccaacctctgagtgaaagaccaatgagtgctttagtcctctgtacacaccctccacagtccacatacagactctcagggatagcagtacttgaagagagagccccaaacccaggactcatggactttcagatgccaacaatgtatatatgatcgaactatggggctcctggtcatactattgatggtattcgtacagtcctctgagcccttgaatgactgtcttcaacatcaagggccagtgttcttctcttacaaagctactatttgcagtagggattttcttgcctttcatttatttgctcagctagtatggattgagcaactgctgccggctcagctaactgtatgtcttaaaggaccctctgctcaggagactccagtttctaaaggagcattcagagaaccggcttccctacccctggctctttttcacaggtgaggaatcttaagctaattgccgatggcggagtgtcaggagggctccatcagcagcaaaggaagggtacttgcagccatgctcagggtacttgcagacctgaaaccaccagcataggaaacaagagaagagaggggcaggaggatgctgagggcaaaagcaggagtcaggggcaccctagttgtgtagcctggatgagctgtgcacccctcactcccctcctgatgcactcggggtaccctttatgtgtccccagtgtgtagcaagctctgtggccagagcttttggagcttcttgcctgctggcctcacttttctagaacaaaggcaggagctagggccatagatgctcagagtcagaacagaggcggtgagcctcttcctgaagcctgacactcctcgcctaatacatggttttaacaagcttagccatctggttcccaagtccataatagattagaagccacaacttaaaagaactgctacaagttagtatgtcaacagcagtgaaaattgagggccacttgtcctcattaggcaggaaagggacagaaaacaacacatctgactgctgctttcctatgtctcttaagaacttttacaagtctgcagaggtcatgaccctgaagaacagttggggcagtcccaggccctgctgctctcttgagaaatgtaaaggcccttgttcagggcaacaagggaaggacctaagcccagaggtggctgaaggccccgctctgaccttcccagacagctccgccgcggctgagtgctctccgtgctggtgaatttgctgttgtattttggaaagaatcatagcaaaatcagcatgcttgctttaaaatatgatttcatttatagtagtttgcagtttactcaaattttcatgagcgtgttaataactctgccagaacttagttacctcatttgaactacatggcgccccatgcagacaggtaaatatttcactagtgtggtttaaagaagcctgagccggggctgtctgactttgaagatcataaccaatttattgtgcttcccccggtgtttccttactatatattctcttatcaatattttaattgaaaactcgtctgtgtagccttcctcctgatcccagtgtttttaagattcttttgttgcatattaaatgaaaagacgtccagattctatgcagatgtgttcgtgcccggtgtgcagagtggagcatggggagtcacagggatggtttggggtgtatggagtccctccttagagaggaagctggattgcccacctccttggcctcagtgtccattcctgtcggtatgcaagggctgcatgcgagttttaaatctagcgaagcagctaagtatcagcatagttcacatcattgttttgatttgtttttgtttgtttgtttttggttgtttgtttttggttggttggttggtttttcgagacagggtttcccttgtagccctggctgtcctggaactcactctgtagaccaggctggcctcaaactcagaaatccgcctgcctctgcctcccgagtgctgggattaaaggcgtgcgccaccacacccggctacttgatttgttttaacaatctcccacctccagctgcctagataggccagggatggggaagaggaaaaaaaaatgttggatctgcgacagtttcaaagaagcagtattggatggtgtcctttctccagcctcagtcagtggtctaaagcaggtcacggaggactagggcctctgctccctttgttcttaaaggactggaggggcaactcgtagttaccagggcttgttgcccttgcagaggccctgggtcgggtcccagcaccatgctgtagctctcggccacctgtcgccctcttctggccgtcacgggcagtgcgcacatattcctctcgctagcagcattagcttgagtggtaagagaagacaagtgctcttgtcctcttcagttctcttaaatataggaaaatgagaattgactggcagcagtcacacaaatccggcagggaccagtgcaggccctgacacaggattcttcaccatgtgtagtgacacccatgctctactgaacttcattgtgtcagggacacaataacatttctcagcctaaagttctttccaaagctgcttacaaagaaccgagataacccctcattactaatggcctgctccttcttcttgcaccgagagctggccggccctgtgagctctgatgaccgatactgtgatgtatgtccattcattcagactctttctctggactactctgtctctgactggcagaatatcttcccaagtgaaagagcgcccagtgccctggcattgctcctcttgctccctctgggccttggagggactacactctggggtgtggtcctgggagctcaggattctagcaccacaagtatttctgaagctgcagctgcgctgtgtacgtgtctgtggtagtgttgaactgctagccggctctctgattatgttacacttcctccttagctgcaggctgttccttacctgcccgtttgagaatcagctctgcctctaaatggggctgagggctgttacaggccagcccaaagccgcaagctctttatccactgagccgacccaagcctctttacagagcactatacaaagcttgtgatttgtctgtgaatagttgaaatggttttttttttttcagttaacatcccaatttaacaataaactaactaaaagagtagtttctaagatatctgaaatagtccagtatttcagaattgagaatgtaagccagaaatggtacttaatgcttccaattccagcactccaaaggctgaggcaggaaaatcatgagtttgaggccagcctggactgtgtggagatagggactgatagagaaggaaagattagcgggtcacgtgaggggacacagcttgcttatgtcacacaactgagtaaaaagttgaagaaaataatttgtctagacagtgttctcactgcttaaggggcaatgtttaatgatgacgtgacgaggaattactattaactagttttgtaattctccgtagaggccctggactgcagagctgtgttggaaagtaagataagctgcagtcttggttgggcattggacctgttcagggtgcagatgcattcctgcatctgtaggtccctgtgccttgtgcctgcctatgcacatggcagattccagcctctcacactactgttgctctcgagttggtttaatcccagctgaaactcagtaaccctcagaaagctggtgctacattttctcccattggtctccttgagacaatggatgggtgctgtggaaaacctaaatagggtgcatgtttcagaatggcatgtccgccatagaggtctaagtgtttcacagagtgacaggaccgttcagggtaactgaggtctccgagggggtccgcttcttgtggatggcttcgtaaaacatccttctatccccatcccttttaatgttgggcattgaaccttgaacatgctaggcaaacagctgcaccctggcgacactctgctctgaaatcagaaatgcatgtttccaatctggaatctttctaatagacctcttttataggtatggccgttgttctgattaaattttatataatttatgtaagagtctatataggcttttaaattaatttgattcttaagaaataaaataattaaaaacctggtctgtggccacttagtgtctcacttttaaaaggtagcttgtttctggatgtgattttacaggcctttaatcccaggattcaggatgcggaagcaggtggatcgctgcaggtttgaggccagcctggtctacataacaagttccaagatagccagagctacataatagaaagattctttcttggggggggtaggaggggaacagaacagcttactagcctttaatcccaggattcaggatgcggaagcaggtggatcgctgcaggtttgaggccagcctggtctacataacaagttccaagatagccagagctacataatagaaagattctttcttgggggggtaggaggggaacagaacagcttactagcctagttttatagcaattgagaatcttctagatgaaaataagaagtgtcctggcctgccacttcacagcctgtgtctggtgtgggcaattggtcagaatgtagagccgggcgtggtggcgcacgcctttaatcccagcacttgggaggcagaggcaggcgaatttctgagtttgaggccagcctggtctatagagtgagttccaggacagccagagctatacagagaaaccctgtctcgaaaaaccaaaaagaaaaagaaaagaaaaaaaagaatgtagggtacttcactatgacagtaagggagtagggtggggaggtaccaatagggaatatgagtgggagggtgtgtgggtgggtatgagtaggtgggtgggtgagtgttggggtgaatggttgtgtgtgaggggatgtaggtaggtggtgtgaatgaatgtggggtgtgagtgggtaggtataagtgtaggtgtgagtgggggtgagtgtgtgtatgtgtgtgtgcagtgtgctgcatacctgcctgttctcttctgtcacctctgtcctaacaatgggtacttgggggcaagtctccttattaggcttccacttgttctagccatgtatgctgtagaggaggatgagagccaagctcatggcagtggccaggcagggtccacacaggaagccctgagcaggattctgttgccttctttctcagatgaagcactttgtctaaatggctttcctggctcatcataaagccccactatcacttcaccctacctctaaaagtggagtcatgttttctaagctgtagcccttcatccctctgtgccacaggactcctgttttctcccacacactcgttggagcagctagggaacaggctaaaacgaagcccactagttctggtgtactatgcctcttgtccccaacatctcgaggcctctccattatctgtgaggtctgtgagtgtgctggcttcccctgggacaggagggaacgggcgccagagctccaggacaaggcatggggactaacaaggatgtcagtcagtgggtcctgaatgagaatgtcatctcggttgcagggagtctgtctgttcctaagccattgtccctattgttactgatgctaatgtttacagagctaatgaactaagattaaagtgcagaactaagaactgtattagaagaatagaggagacttcccctcagactctcttctggtgcttaaaaatggtcagaattacatttgatgagccttcagacagctttctcagtctggctccgaagccaaagccgtggtcccctggcacctcatcaggccatgaagtcagctgtacaggaccctctcccagaggtgtcttcagaaaccacatctgagagctaaggcacattattaggaccagtcccacggtggaaatgtaattctgtttatctttgctcctagtgagaaacaaagttacaaagatggacccctgaggtctgcagaggtttgcatctgcagcatccctgcctcttctcctgctctttaccttctctgttccctctgctgttcccagtcctggcccttctcctccgtggtctgcacgctcatccctcattgctcttccactagggactgttcacctccaaaccctgtggaccattttctccctcacgccttccagtcacagtccagctcacttggtgacgctgagtgtagtccaggcttggctctcttcatgctgccatccatactccacacaacaggagcccctggctgtcagtccccgtggggtctgtgtctgtgtctgttagtcctgtctgccttgtccgtccttcccctctacatatccaggccttatttacataccacccttttctgccaccttctcctcgatgcttgtttaatttctcccttcacgggcttccatgaggcctcatctccacaaccatatcctttgttgttgtgtaattgttcatttgtgtatttgttacagggcctcgtagagcctagactagcctcaaacttgctctgtaatctgagaccagccttggctcctgaacctcctgcctacctctatctcccaagtgttcccaagttacaggcacttactaccacctcatcttgcctcatcttgtaaaggttgtggctgtctcctgaccacacctgggttatccgtaccttcatggagacggagactctctcagtcctgtcacagttgtctgtcaagggctcctacattaccattgcatttcattttgagcctctttgctcacagaaccttcctaatgccctcttcctcagaactgccccacagtcactataaatacatggaggcagacatgagtgtgaaggacacaggacctggggacttcctctgtgaagaggccggtggttgccgtgaggagagaaagcgattaactctgaaaggtcacatgtagccgacctgtggagaccctcaagtacctaagaggtcacgtgtcagattaggtcacgttggagaatgctctagccatttctcctgtttgcatgtatcttagctctccaagtaaatactgtgtctttaatctgatttgcgttttggggtttttgttggtgttggtgggttttgtttgtttggtggtttgtttgattttggtttttggttttttggtgtttgagacagggtttctctgtgtagccctggctatactggaacctactctgtagaccaggctagccttgaactcagaaatctgcccgcctctgcctcccgagtgctgggattaaaggtgtgcgatgccaccagactccgccttgtctcacagctttaacgaatgattttatggtacaaagggtcaccctgggatttaattaacctcacctgtttgataatattcagatttatgtcgagaattggcactagagcaattcaaaaggaagacgttggggtagatggaaaaagagtggcaggaacaggcactggctgggctctcctctccgtactgtcatttggagggtggggcctatggtcattctgtatgtccatatgtcccctcccccacagagcagcaaagggcagtgtatctgcgtcttcacctctcactgcccctgagctctgaccagagcacagccagcaagacagccaaggactggccatttgatgataaagacccatcagccagatatatagatacagatagatattataattaataaaaagaagaaaagatcaatgggtcagcttttgtcttgctcaggctactaagcaaaatactagaaactgaatgattgcttataaacaacaaaaccttaagtccaagacaaaggcactgcggggtccggttctctccctccggggtgtggaaggagagagctagctctgtagggtctccttcactaggtcactaatcccactctagatccctcgacctcatcccctgcagagaccgcactctgaaatgccatcaccccgcgattcactgtgcaaacgggttggacacagactctcagaccctggccctgcaggggaaatctcctgactttatcttacagcagctttctttaacagagaggactttccatgctcgggagactcagaggacttgtagatgtatccacagggtaaactgctcccagataagcccagggccctcttctttcatctgactctctggaaaatcgaggcctcagctcacgctagtgcacctcactgctgggcagatgctggctctcagggcacttgacagcttgcaccttggttttcagtttttgttgagggcagggtgtttggttgggttgagtggttctttgtttctttctttctttaaatttaaacaacagaatcttgattttttttttaagtaatgtgtattctgcatttcttactctaaataaattcaaataaaagaatcttttatagtttgcttcctagatcccgtttctaaaatatagtaagttaatggtttaaattcagaatttcctttttgaaaggacctttaagatgttttgtgataactttcaaggtaaattccaattttgtttaatttccatgctcgcagtgtagaagcaattgaattacccacggttgttccctgagcatagaggaggagataagcactccgtccgtctgtattgacagatgtgaacgtcgagcaactgaagccttgctgtaaaccgtgacttgcttgggcttcagccaccgccgagctctggaaatgagtgctggccctcgcgtgcacgctcgctgtctgcaggtgctccgcttgccttctgggatgttggtttaaaataaataatggtagagcccaaaacaggagagcgctctctgctttccagttgtccatcctcgaaggcagagcatggctccttggcaccttctgcagcattgtgtcgcgaggcagggcaaggtctgagtctagccagcacagcctgcctgcaggaaccactccagtgtcctggccagtctccagcctcattctctccactgcttagagcaggccccagcaactataatcatttgcagatgaggtaactctgtcaaggaggtgatactgtgtgtctgactgttactgtccgcctgctagaaaactctcacggcatgatttctccaccgtccacagcctcgatagcagaggtgctgtgatctctctgtcgtccacagcctccatggcagaggtgctggtcatgataaaagattgtgcttccccatagtgcatttacttctattccaaataactgccaggcgtggtggcgcacacctttagtcccagcacttgggaggcagaggcaggcggatttctgagtttgaggccagcctggtctacagagtgagttccaggacagccagggctacacagagaaaccctgtctcaaacaaacaaacaaacaactggcaaacatgacagctgacacgagagccctcagtgccagcgacctgactttcgctgctcccagtctatctcagctgggaatgtgaaacagagaagacgtttgttctgcctggcacaacttcagctttcccgtgctggatggcacatcgcagtgtcatgcaagcccctcaaacctcacctccatgatgtcctcatgctgcagagccaccacgtaggatggtaaaaaccctggggtctgtggctccttgcctggttcctcctggctcccatcctgcagctctgcccacagactgtgaccctatggtgacctatgcgacccgtcggccagtatctgagcagtcagtggaaggaaggctggacccagaaaccagccttcctcacagcatgcagctgcctctcctctgcatcgtgtgccagctgagtgccaccaaaaacatgttcttctatgaaactgccttccctcttgttctcattcataaaaccataagatgtgaaagtaccttaatccctttgttaacgattagaggttgtgtggatctgcacccgcacagttaagtctctgactcgctcagaccccagtctgaacccctggttttagctccgatggcagtctttacgctgttagtccacagagggatggtacctaatgcccaggaaagccaagagtgcaggccgacacagaattgtctacacttgagcattgtccgctttttctaaaatttgatttgtagttctccagcttgacagcgtcgtgtcacagtatcaaaaaggttggacacacctggctctgcccttggcccaggaaaggataaagcgggaattgtgaatgggaagcagcaggctttatagatggagagtcaggctttggttccccttaggggcactgctacttctgctgctgctgggcttctgcaaggacagtctttgacggcatccgtctgatgtctgggtcatatttgatctgcgatggcatctcctgcctgtgtttatgatcctgtctctaaatttgttttgaaagcacagtcaacaatattaacaatgtgacgatgctaacggtctcttccgctgttccgtggggatgctggggtaaagaagtctaaagtgcctctgctgctccctgggtccttgtgtgactgctttgtttcagggagataggaacagaggtgacagctaaagagatggatgtgactcgtcagcatgcttagggaaaccccggagagaatgttaaatggatcccccagccttgctgtctgccttgcccaatctgtggttcacaacaccaacttctgagatttactggtcctcatggctttgaaaatgtaagaaagtcacatgatgtgctttgaatttagagatgatttgtgttagatgatcatgtgtcacaggcagggacaccacgtggacctcactctggtcgctgggaaatatgtttaggggaagcacagaggtgagggtcctccctcctttgagccatgaaatgtcagaactatgcatggtggctcatccatctaattctagttctaaggaggctaagacaggaggattgccacaagttcaaggctaccctgagctacaacacactgagtttcagaccagtctaggctacagagtgagacctatctcagaagcctaaccatctatctccccacctccaaaattgtgggttagtgacagagcttggctggcagtcacacacacatccaaaagtggggtttcagtgtgatcttcgtcctgtgtattgaagaaggcgtcaccggcttagcatccggaagctttccgcatactgtgagcagaggagagtcccctgctgggatgggcactgaggtacgctgggtgcttcttgctaaagaacaaccaagatcagattgctaacagcgaggaggctccttcgggcactcagagactgtcagatttgcttaggacttaaacccaagaatgttcagagaagctagctcctaagagagagcagacagcgtcttatctgaccgtcttagctggaattccctttccaagtacctcttcaatgcacgtggcaaaggctgccttcccacctgataacagccccctgcctctgcacagcccttaacacatctcaaatgtgacaaagttccttatttttcatgagtttatctaaatatgaatcagaacccgcttctaattcttcattccacaatttagtctagaaaaattagcataaagacatgattgcagctaagcagttcgagcttacatttgaggccctgtgtcaccttcttttacccacactgcaacctgaacacgaatccaagaactactgagaatgggattcctcattctacacgcgtgcttcacccgttcttccccccgagcttcataaccggtgcagttgtaaaacatttggtgtggttttccatagtgagacccatgtgaagtacagcattgcacgtccatactgtggcctattgtctgaggggagggtcttctccttagtgccccgggcttcataggctcatttggtcccagatgactctgggccactgccccacaattcacccagtattcaggagcctttccaaactttcttctttaatcttagtaagttactgtatttcgtgggtctgagtattttgcccacgtgtgtgtctgagcgctgcttgtgcccatggaggctggaagaagatatcagatcccttggaactggagttacagatgattgtgagcagccacagggatggtggaaccgaacctgggtcctctgcaagagcattccgtgctcttaaccgccgagccatctccagcctttctgtgtgactctctgacttgttcactagtaagttagtcgtttgctcactaagcctctggccgtgctcttaggtacttgcatctgttgggtgtgtggacgcctggcgttctttctagtcagaccacgctcacttcctgcacgtctcccatcccttccatccaagcgtctggctccttcctgtgataagcacccctcagaaggcaaggtacaccatggttgttcctgggctgcctctgggccagcttggagcacatgtgttgcagaaaattctgtgctgtgtccctcctctaaagtgttctccctgcaggctccggaactggaataccatggacatacctcgctcctgggagccattgtgagcctgtggtagcgagctgtccccgacctgctccacaccaggctctcggggccgcccgtgcagctgctttgctgcctcatctctagctgctggccactcagtgccaggcagtcccactctctgccctgcagtcacggggcccacccttcttcctgttccaggcacccatagcacccagaaatgaggcattcaaactgaggacaaaggaaagcctctctccttcccttgcgcctctgttttagagaaggtcccagcggggacactttctcagccttcaaccattgagcctcaagttctggctgaaggaggtaaaaacagtacgccgtgtacatgtctgaaaatgtcataagccattactcaatggaatattaaaaaccagtataataaatgcatttctaaaaatgacagtaatatcaacaaataataacaataacagtgattttccggccagtgtgggagtgccagcgatagatgcttcactcttcctgagagccagagaccctttgaggaaagctgagaagctcactgtagacactcatgtggtagaaccattcctgagctgcacgtgatctgagctccgagggctgtgcctgctagcttgcccccagggagctccagttggtccctgcacagccagcaactgtatcccttcatgggcatgcggtatagtgtggccttcagagccatccaattatgggtatcatagttttagctctgcgtacttttttttttttacttaggtatgctgtggaagtttggatgggaatgggtcccgtaggcttgtgtgtttgaatatttggtccccacctggtagagttgtttgggaagatttaggatgtctgggcttgctagaggaggtgtgacactggggtgggctctgaagtgtcaagactcctgtccatcccagcatgctcactgccttctgctttctgggggagatgtgagcgctccactgttcctactgccatgtctttgctctgccatcacagaccctaaccttttggaaccccagtccctagtaaatgcctcctttaatgagctgccttgctgcagtcacagggttttatcacagcaacagaaaagtaacaaaggcagtgtctctctgtatagcccaggatatcctagaactcactcaaacacgtgacccttgtgcctcacttatccaagagctaaaacgacaagtatttgaggctagcctgaaaaacatagtgagatcccattgctattccaaaaataaaagtagaggcaggagagatggctcagtggttaagagcactggctactcttacagaggacccaagtgtgattccccactcacatggcagctcatcaccatttttacctacattccaggggactcgacaccctcttctggtctctaaaagcatcaggcacgctcatggtgcacatgcgtgcatgagtgcatgcaaaacaccattatacacaagatgaataagtactttaagtaaacaggaattcatgagaaatggaagcttttccctcctcgcccaccgctgctcagtggctctgtgtctgtccccttcctgctggtggctgcatctttacacatctgcagttcctttggtctttcatctgcccagcaaagagtcagacggactgatggcatcggggcctccacttgcattggttcactgttctcccatctgcccggcctaactcctctgctccctggcacccgtgactcctgctgaagtccacgcaggtctgcacggaacagcaggtcctctttccactgcagccctagatgcaggacccaggtgtccgttttttagtgacagtcaggtagagaagggggaaaggtacgaccagatggcctcacgtaggggggtgacaggaggctatagagctcccgcatcctgtaatgcaaccatggacttcacaaggaacacttttctttgctgtcctgtaacaggctcatgaggccactttcgactgcctgaccaggctgccccccataaacgagccctgtgaacgagcttgctactcagtccaaggctccacagctgccagcctgttttggctgccttgggcccagtggccaccgtctacttgtctaccccacttaccatgtgcaggaaactcttttccgtgggccgcatagccgtttgattgtaaattgcattaacttcctggagccttgccagccgcttgctgggtgtctgatgctatctgtatagactttaggtggaaactggaaatctcactgaacttctgtggtaataaaattattacagttgtaccctacatctgttcactgacttcctgtgggttttcaccggatcacatgactgacaacagagacaggctgtatgtagtaggccctgggtgtgccagctctatccaagtctcaacgccacctcagacttatgctgtgtcgctgagtcgagcgtccgggtgtcccactgtggtaggttgatttcactggagctgataaaaaaaaaaagttccggcccactcgagagtctaacgtttcctctggctccaaaatttaaaacaacgggattgttgtaagtggttttggacaaagaccaagctccaagcttcggagatgggttttctccagtttcaaaaccaagccacgggccaaggatcttgaagagaggtgtgaaagccagggctcctacctggcagtccccttatgcctctccagcacccctcaggccacagtaacccaaaagtccctggtaggagccacagcagaggcctgagaagggctagagaagcaaagtacgggggcagaaagtgaagcactgggctgacatcagcgctgggactcgcccacagctggcccgcagctgcctcgtagcctggcgtgtcagggatggggacgccccccgctgaggaagctggatgtcctcagccacacaggatgacattagtgttcttcatgggcttgcacagggaagggtgactctttctggtttgttaatgttaccttcagacatgacattttgtggactgcatcccgacaaaatatgtccccggtgtctttagctctaaacaaaaccttttgtcttccctttccttggctcttgagcattctaagatgtctcggagaagcacatggtcttaaggatatctgttcaaggctctatagctaaccagacagacaggttgtggtgatggggaagcagggcatggaaagtgtggtgcaggcccagctcaggtagctgctacaggcgcatccggctgctggatagcctgtttatgcctgttacctgctgtacaggagtcctcagtcagccaggcttgcaaatagctcgtcccaggagaaggggcgtcacctgggctttcaattgtctgcctcatgccaccagtctggaaaataggtctatgtttaccttgctatttgtgccaccgtcctttatgaaccatgaagtgacctgctgctggtaaagattccagaaagaacccagaaaataatagctcacagttcagttattcacccaaggagaaagatgacagacagacagtgggcaggtgctatgatgtggtctcagagccatgtgtgctgtgtctagcagacttttctccagcagtgacaatgtttacgttgctgtgttattgtctctgccttctacttccctgtgactcatggtgcacacccaatagactacaacttgcaaacactgtctgtagaatgatcaaatcttcaccagacagcaggcaggacctaaaccctgtaggccacttagccataagttcccagcccacagagctacttaacaacagcttgcttggtcttggacagttagaattgccttgaagagcatcagttgaatcccaggatagtgagtgacacaaggaacataggtatctgccatgaaggctaactgcatgaagcctgtgcctgcttgactttaaagttacagtggggtcagccagcaaggcagggaatggaagggtttagatcccccactcgagtcatctgacagatgtcagaactgagaggagtacataagtcctgcattgtacacaagctgagaaaccaaagtcccaggaaaataccctaaagtgcccagcttgctttcctggccccaacctgggctggcagagggcagcccgtgcatgtcacagtgagacacccaggcaccacagttgaatgagaccattgaagagcatctctttaaaggcctgggaacctcatacccacctagctgtggatgtttggaggacggactccccaatccttggtttgagaggctgcagtggaagagtcctatcttctgctggcccgtggcctctgtagcaggttactcaacttctccactctctttctgtacagtactttgtttaaggcctgacacaagattattgtgtgatatgaagtcctttgttcattccattcagcaaataagtgtccataccatgccagatgctcaaaaactaaggtttctggtttccgaaagcccgtgatatgtttacgtgtgaaataattcaaaaacaggatccgccccaacgtaccagtgagagctgagaagacagtaaacctgcgggctagggcagccacgttagtcttcagtaaggtgctcataggacaggtgcatgggagtgggtgtgtggttgtgggtgtgtctgtgcatctgtatttgtgtgcctctgtgggtctgtgtgtgcatgtgtgcacacatgcctgtgtaagtgactttggtcaatgtcacatcccctctcttgggctgttcctgcggctccccccttggtccagccccatctgtccagttccatgcagctcagagatcgtgttgtttcccatcccagctccttcttggatgtcactggaggtgtcataatcttgtgaatacctgtgctgtggtcctaatttcacatacatggtagggatggcccctgtcgaattactgtaactgtaaacctgcctcagggttactctcccttcccactagccagcttctgatgaaaggccaaggccgttctccagacccatctcctcccagtgaccaggctttgttccttagagatgtccgtggcctgagcctggtgtagagagccgttgctcagtacctcttcctagcttccatgcagagaggccaggtccccacctcggcgaggagcataggagaaacagactcgcatccatcccagtaccccggtctcttctttggtcgttgtactaccagtaacagccagcatttgctggctgcctgctctgtgttagacattctgcaaggcctttctgtcatcatatggcttcactcatttgagcgctcagctgcgacagtcagacagttaaatgcaaaacctcagaggatagtgccaaactgtgttccgagagcctgaggctgagcaggaacgggacttaaagagtcacaaccaatgaaggcggacttctgctccgaaactgtgggtctgggcactcctcagccacagccatattacacactgggaaatatctgtaaagggagggaggagggaagaagaaaggagaggcgaggagaggaggggagggcttaaatgatgccttctgaatagtttttcttgttgcttcagagattaaatgattgtctcaaaacactttaatatgcctgttaatgtaatcaattatgttagctagaaactggcttgccgtagtctcagaattgctaaagtgtgttgagtggcctttaacttggtagccctagccagcctggggctcactatatagaccaggatggtctggaacacacagagatcctcctgcctctgcctctgcctctgcctctgcctctgcctctgcctctgcctctgcctctgcctctgcctctgcctctgcctctgcctctgcctctgcctctgcctctgcctctgcctctgcctctgcctctgcctctgcctctgcctctgcctctgcctctgcctctgcctctgcctctgcctctgcctctgcctctgcctctgcctctgcctctgcctctgcctctgcctctgcctctgcctctgcctctgcctctgcctctgcctctgcctctgcctctgcctctgcctctgcctctgcctctgcctctgcctctgcctctgcctctgcctctgcctctgcctctgcctctgcctctgcctctgcctctgcctctgcctctgcctctgcctctgcctctgcctctgcctctgcctnnnnnnnnnnnnnnnnnnnnctgcaataacaattgtccacttgaatagtaacttcattataaaatctgcccatgtccgccattgacagcttgtccacatgagcaccgtagtgttttatgcactggccattaagggacgcccctggcggtgagacggtacacaatacgtgggagctttgtctgtttattgctgaatagtttacttcggatgagacggacagtccccaccttgtacctttgtacagggtgagatgggttccggtttataacttttggtgtgacagtccacccagggaagctggctgcttttcccacttccacagcctccagacttcaggactctctacctcgagcccttccatcagaacagtcacaggaatgtcccttcccttccctgtgagcactgtgagggtgggtgacagccaatagcttagcttcctctggacagcttagctgtgtgagcagtcccaacctcctcagacacagacagtgggctcacagaggtcctctcatgtcccttcaagaccctgtcaggaaacctttcccccacgtgtcactgtatggagaagaggccccacccccttgagtcacttggtttgtttgttttgtttttagacaaggtctctccctctctctctgtagccctggttgaccttagaacccacagagatctgcctgcctctacctcctaagtgctagaattataggtgtgtgccaccatgtggtttttaattctaacaacaaaggcccgtgctgcctaatggtttcattgccacagggaagtgcagggcactgtaaggagaactgatcctcggtggtacctcagagaactgcagctgactgaccactgtagcagaatgcctaaaacccgggcgctcccttcaaacccacctcgcccagtcagtcaggtggggacgttcagcctcactctatccaacaggctctgtgtccttgaggcgtgcacagagcctgctgaccctgggtgacccttccgttaggagggtgactcggtctcagcaggcagttgtgctgagttgccctgtcctaaggctgtgccaggagcagtggttggatggtgtgtgaggacggctgctcagtgaggaccactgctcggtggtggctcctggcagtgccctgttgctatagatctcattttccagatggccaccacaatagttggttcttgtccacactcacatgacactcggtgccaaacagtgaggagccactttcacttcagcacagcctgtagaacccactgcctggggtgtgtgccattgtcctctaagaacgttctgaattttcacaatgtaactcagagctccccaagccacaaaataatctaatgctgcttaactctgtccctcttcagtcattcagaaacctgggggtctggggcatgggtgttttcagtctgcattgttcgttctgtctcatacacacacattgtaggggtgtgtgtgtgtgtgtgtgtgtgtgtgtgtgtgtgtgtnnnnnnnnnnnnnnnnnnnnnnnnnnnnnnnnnnnnnnnnnnnnnnnnnnnnnnnnnnnnnnnnnnnnnnnnnnnnnnnnnnnnnnnnnnnnnnnnnnnnnnnnnnnnnnnnnnnnnnnnnnnnnnnnnnnnnnnnnnnnnnnnnnnnnnnnnnnnnnnnnnnnnnnnnnnnnnnnnnnnnnnnnnnnnnnnnnnnnnnnnnnnnnnnnnnnnnnnnnnnnnnnnnnnnnnnnnnnnnnnnnnnnnnnnnnnnnnnnnnnnnnnnnnnnnnnnnnnnnnnnnnnnnnnnnnnnnnnnnnnnnnnnnnnnnnnnnnnnnnnnnnnnnnnnnnnnnnnnnnnnnnnnnnnnnnnnnnnnnnnnnnnnnnnnnnnnnnnnnnnnnnnnnnnnnnnnnnnnnnnnnnnnnnnnnnnnnnnnnnnnnnnnnnnnnnnnnnnnnnnnnnnnnnnnnnnnnnnnnnnnnnnnnnnnnnnnnnnnnnnnnnnnnnnnnnnnnnnnnnnnnnnnnnnnnnnnnnnnnnnnnnnnnnnnnnnnnnnnnnnnnnnnnnnnnnnnnnnnnnnnnnnnnnnnnnnnnnnnnnnnnnnnnnnnnnnnnnnnnnnnnnnnnnnnnnnnnnnnnnnnnnnnnnnnnnnnnnnnnnnnnnnnnnnnnnnnnnnnnnnnnnnnnnnnnnnnnnnnnnnnnnnnnnnnnnnnnnnnnnnnnnnnnnnnnnnnnnnnnnnnnnnnnnnnnnnnnnnnnnnnnnnnnnnnnnnnnnnnnnnnnnnnnnnnnnnnnnnnnnnnnnnnnnnnnnnnnnnnnnnnnnnnnnnnnnnnnnnnnnnnnnnnnnnnnnnnnnnnnnnnnnnnnnnnnnnnnnnnnnnnnnnnnnnnnnnnnnnnnnnnnnnnnnnnnnnnnnnnnnnnnnnnnnnnnnnnnnnnnnnnnnnnnnnnnnnnnnnnnnnnnnnnnnnnnnnnnnnnnnnnnnnnnnnnnnnnnnnnnnnnnnnnnnnnnnnnnnnnnnnnnnnnnnnnnnnnnnnnnnnnnnnnnnnnnnnnnnnnnnnnnnnnnnnnnnnnnnnnnnnnnnnnnnnnnnnnnnnnnnnnnnnnnnnnnnnnnnnnnnnnnnnnnnnnnnnnnnnnnnnnnnnnnnnnnnnnnnnnnnnnnnnnnnnnnnnnnnnnnnnnnnnnnnnnnnnnnnnnnnnnnnnnnnnnnnnnnnnnnnnnnnnnnnnnnnnnnnnnnnnnnnnnnnnnnnnnnnnnnnnnnnnnnnnnnnnnnnnnnnnnnnnnnnnnnnnnnnnnnnnnnnnnnnnnnnnnnnnnnnnnnnnnnnnnnnnnnnnnnnnnnnnnnnnnnnnnnnnnnnnnnnnnnnnnnnnnnnnnnnnnnnnnnnnnnnnnnnnnnnnnnnnnnnnnnnnnnnnnnnnnnnnnnnnnnnnnnnnnnnnnnnnnnnnnnnnnnnnnnnnnnnnnnnnnnnnnnnnnnnnnnnnnnnnnnnnnnnnnnnnnnnnnnnnnnnnnnnnnnnnnnnnnnnnnnnnnnnnnnnnnnnnnnnnnnnnnnnnnnnnnnnnnnnnnnnnnnnnnnnnnnnnnnnnnnnnnnnnnnnnnnnnnnnnnnnnnnnnnnnnnnnnnnnnnnnnnnnnnnnnnnnnnnnnnnnnnnnnnnnnnnnnnnnnnnnnnnnnnnnnnnnnnnnnnnnnnnnnnnnnnnnnnnnnnnnnnnnnnnnnnnnnnnnnnnnnnnnnnnnnnnnnnnnnnnnnnnnnnnnnnnnnnnnnnnnnnnnnnnnnnnnnnnnnnnnnnnnnnnnnnnnnnnnnnnnnnnnnnnnnnnnnnnnnnnnnnnnnnnnnnnnnnnnnnnnnnnnnnnnnnnnnnnnnnnnnnnnnnnnnnnnnnnnnnnnnnnnnnnnnnnnnnnnnnnnnnnnnnnnnnnnnnnnnnnnnnnnnnnnnnnnnnnnnnnnnnnnnnnnnnnnnnnnnnnnnnnnnnnnnnnnnnnnnnnncttgtctacccagatctccctttcctacactgaggaatctcccagctcgtgatattttatttcagcccgaagtttccacctcactaggaaaccatggagctcagtcccccacaccgagatggagaactgaacttcttgttgacccctcttcagacccttccaagactccaagaccttactgcagagtgcagggacctttggtgtcccaggcccagacactgcttactggtgtggacactccctgctgccttgtgacccatcagcacagcatccgtgggactcttgtctaggacgcgcttcctactccgtctggccacgccacctcggcaggccctgcgtgtctccccctccccagcccttgggtggagagttcattgttgtccccactgccacttgtctctccttccaagaacttggacttcccgtgccaacaggaactgctacacccctaggccccagcccacacaggcctcctggcaccaagcagccaacactggagtaaacaaatgtgctctgtgataagcttgagggagaaggggagctctcctgtctgtctgtgagtctagggcatgctcagtgctcagtgcgtggagattaactcactgacacagtgagctttgaacacctcctggtactctgggatgtggctacagcaagcactggtctctgagcctgagcaccggggatgctatgggtgggtgtggcccgggtgcgagtggataccttgttacctcctctttctggcctcgcttcagccttccacctacatcctaggaccctggcttgttctcccaatgctgcctgcaacagagattagcacatggaacctccctggggggaaaaagcaaaaggctttcagtagaccccagctgttcctcaggctgcaggggaagttgcctctgtcccaggtagattagaaggtcaggaataacattagagctagaagctaaatcctggtgctgtggtacaatggcaagtgctccctccggccactgcctgcctgctcagaagcaatggagaatgctccagggccccaggggatgtacagaaccagccctgagcttcccacagccctaagaggaagaactcagccgcgtagtccccagtaggatgaggacaaggccagccagagccagctgcttcctagccatgagtgcgtgcctccctcttcagttcatggctcaggactttctataagtaaataaatatcccttcattgttgacagtttatcacacagctggattgacagagccactcaaacaagcacttgcccacgcccagagtctacacgtctcagagaactttatacagtctgaagaaggttaagagtgtttgagggaagattctcacctctaagataacccacttctcaagacagaatctcccaagaagagccaggccttgaccctgaacaggaaagagggtgtttaccttgtctgccacccagcagagacccacctccttttaccaaccctcctttaggaccctcctccgcaaaccagccaaggtcacatcatcttagttactattgctgcgatgaaacaccatggcccaagcaacttggtgaggacagggtttgtttcactcacagttccatacaacagttgaggacaggaactcaaaagacagagcaggaacctggcggcaggagctgatgctgaagccgtggaggaggatgctgactgacttgctccccatggctcgctcagcctgctttcttacagaacccaggaccaccagcccagggatggcaccacccataatggactgggccctcctccatcagtcactaattaagaacatcctaaaccgggcgtggtggcgcacgcctttgatcccagcacttgggaggcagaggcaggcggatttctgagttggaggccagcctggtctacaaagtgagttccaggacagccagggctacagagaaaccctgtctcaaaacaaacaaacaacaacaacaacaaaaaaaacaaaaaaacaaaaaaaaactaagaaaattctctacaggcttgcctacagcctggtcttagggagacattttcttagttgcgatttcctctcagatgactttagcttatgtcaagttgacataaaaccagccagcacagcaggtaagttatattttcccagcccagaagccatttgactggcagaatctgtgaaaggcctgtattcccagcctgcaagcacttaggggagggccttgctgtacaccccccactgcttgtgcttgtacatgaaagtcatcttgttctcattgcagaagtttccagaactgaagttcaaatacgtggaggaagagcagcctgaggagttcttcatcccgtacgtctggtccctggtctacaactcagcggtcggcttgtactggaacccgcaggacatccagctgtttgccatggactcggactgaagcaggacacagccacgcccaccccagccacgcccaggagcagaggcagacagactgcggcaccacagagggtcaaacaagcgtgcttccctcacacactgtgactattgggagactgcgccagttagcagtagttcactcagccttgattgtactgcaagggcgagacaaaaataaacgggaaacgtgctgttcaacatgtgacttatttttaaacttctaaaccccaaacctagagctgtcccaaaacactggggccttaggcacataacaaacgtatcaacagctcacaccatttccccttttataaaatttgttattgtttttagatttatttttattctatgtgtatgaggttttgcctatatttatatatgtgcaccatgtacaggcctggtgcccacagaagtcagagagggtgtcagacaggaactggagtgacagttataagctgccctgtggggtctgggaacagaacctagttcctctgagaacaacaggtgctcataacatgcccgctgagccggctccacagcactgcttctcttcttgagacatgttctcccactgtagcccttgccgaactgaaattcactaaggagcctaggctggcctagaacccacagcaatccttctgtctcagcctcctctgagtgcagggatcacaggtttgagccaccacacccagcctacacatcttttttttttagttctctaatattgaaaatgtttgtttcagcttgtacaacttctctcatgtgtctgtgtgcatgaacgcatgtatgtgcatgtatatgtgtatgcatgtgtgcacgtacatgcatgtgtgtatatgtgcatgtatgtgtttccatgcctctctgcagcacaagatttcataagcactgtacctgccatgattcggaccttccccagagaggttaaatagttcttttcttggaggattcacctctgagctgtaacaggaattctgtcagagtcaagcaaaattaagtttatctagttggtatcactcattggggaaagcttaatttggaaggcaacctttttccttcaaccaagccaatcggatgaacaataggagagccacttactgagacagtattccatgtgagatgaaaaatacttgtttctccttgtttctgactttgaaaaatgtttgggaccacgaatttggtcccacacacccaaggctgtgtagagtggaccatgtgtctgtactccaagcgccaaggttccgtggctgtgtgtgccaggttgcagtgtgtcagtctctgctcactccgttggtctcttaggagcagcctttccatctgtccccacccccctggctgagggcagagccctcatggtctgtaactcatgcacaccccatggctggtttcccctcagtgagctgggctgagccttccttccccggttttcagtcccttatccttttctggagaagatgaaattggagccttctctggtgtggtggtgcaggggccagggcagccatccccctgctgcctccgaatactagttcccaggaatggctgggatgctcacgctacaactcacttgtgatcacaaggacagggcttctcccctacctccggcactgacttcccagtccagctttgagaggaaggcatctggaggtggaatggcctagtccgcctttgaggcagtgacgatgtgtgtttcctacctagagaaatgattgactgctttcgtttgttttcagtgcgttctaatttgcttctttttcctgtaggcaaaacaaaacaaagcaaaaaaaaaaaaaaaaaaaaaaacctgtctcatgtgaaataactaagtacttctttggtaggctagggactaagcaggagcatgagacagcaggtttttttttggtttttttgttttgttttgttttgttttgaaaactcttgtttatttacaaaaatagataatgcatatgtaagggacccacagtccccttcacttgtacccatccaccccctttatacacaaaggctccttggtccaaaggcagagttctgattgactgggcaggagcagcaccaatagcctacatttcgtaggctgaggaaaggcccagggagttgactgtagctctgtccttgctaatggaggcaggcagagggctggagcatcttttcagtggatgctcagtccttaaaaccttgaatactgcagagaattcgtttctggtgccctggcaacgttattcccatctgcgtcaggtcctcagccgtcatctccagcacacactccatggtgtccggtccagcccagccgaagggaagtgcaggatgtagcgcttcatgcgtatggattcaagccactcagagacacttcgataagggatccatcccatcagagccgctcagactgggcaggcgtaaggtcaccctagggtcaaagtttctttaacatgaattacagtccctgcagcccatcgctatgatggaacacggtgcctacaaagactctgccccagcttcctggctccacgtgccctgtgcccccgccccggtgcttgcctgctactgacactctctgctagctcatgggctcggtggcctaagagttccacccgggcgccactagacagaggttcccagttgtgctatggcctgcctcagctctgcagtcactgggtctctttctatcccttagcgaaggacaggtccatcacatggcaagagacttaaatgataaggtgggttgagcttgaattcaaatatcagtttgtttagaactgtcaagatttaagaaggcgtctggctgaagaaatggctcagctgttaaaagtacttactcctgcagtggaccagggttcagttcctggcacctacaatcgtctgctacccagttgcaggatctaagatcctcttctgacttctgtgggtaccaggcatgcttgtggtgcacatatacacacagaagacacgtgtgtgtgtgtgtgtgtgtgtgtgtgtgtaatcatgcaaggttagcctgtgttcgtgaaaaggtaaaaattgacctgattttacttatgatcttttcctgagataaacaatgattgcagccagcatggttgtgcatatccttaatcccaggacccaggagacaaaggcaaatggatctctgttagttcaagactggactgggctacgtggcgagatgctgtctccgctcagagccaggtgcaggggagaactgtcattgtgtggagtcactgcacaccgtacagagagttccaagaaagctgggggccagggctacacagaatgactctgtctcaaaaatagcaaaaaataaaaagactccacacacccacccacccacccaaagcaaggaagattcgccagcagctcatctccctgaacccgaactgacgttacatcaccatgtgagtactcagagacaaggtccaagttagtaaacagcctgtcaccgtctactgtgcactgctgtccttgggaggcccaacatgggccatgtgtaaaacaagaactgagtctgaagaaacggctcgtggtgaaaagccgctgctgctgacccaagttcagttcccatcacccacatgatggttcacagccatctataattctaggacatggagatcctataccctcttctgacctcacgtgttgcatatacatacatgaagataaaacacacaaagtaaaacctttaaaaaaaaaaaaaaaagaaccactgagcaggaagtgctgagggtgccatgtccctgtgccccggggcaggtggcaatcactatcccgttggctctaagatgcccctgggcgctttttgtaagtatttgttaagatttttaagttactggacacatggtttggtttacctactcttccattgctatctataaactaaacctcatggagtagctggcttgctaaaccatatgaggctgatgaggaccaaagaacccagttgcctatatccccagctaccaagcccatgaaggaaacaaccataacccttgacttgaagttcatcctacacagcacaacccgaaggaactgtctccagagaccaggccaaatgaatcactgggattaaaaaacagtagtacccagaagagacccaagtctatcagacacagagagcagctgtgatcactgggtccaaaacgcacattcacttggcctgagagatggcccagtggttgtgagtgtttacagctctagcagagggctcaagttcccagcgcccacactgggctgctcacagcagcctaggtctagctccagggaatctgtctcttgtttctatagctatagccccaagtgatgtgcatacacctctgtcacacacacacacatgtgcgtgcgcgcacaccataaatttacaaaagaaaaaaagaaagaaccatttttaaaacccagatgtattgccaagagtctgagcagagcattgtgggtaaaaaaaaaaattagaagttgtagaattttgagaataattcactagacgtgtttaagaacagattagacataactcaagaacagattgtaaagcaaattgggagggctgaaacaggtgaagccataaaagaaactggagacattttgaatggagagagaaaaaaatcgtacaactaacagataggggctggagaaatgaacccatggctaaaagcactggctgctcttccagaggacacaggttcaattcccagcacttacatggtggctctcagctgtcattaactccagtttcagagtgcccaatgccttcagtcttttttttggggggggggggatttatttattttatgtatgtgagtacactgtagctgtatagatggttggagccatcatgtggttgctgggacttggacctttggaagagcagtcagtgctcttaaccgctgagccatcttgccagccggcccttagtcttctgatctgcacaaagggcactcacatacgtgcagacaaaacactcaaacgcctagtcaaaataaatcatttttttccttaaaagagggctagagagatgactctggttaggagcacttattctacagggcatgatgatgcacacctttaatctcagcactcaggaggcagaggtaggtggatctctgtgagttcaaggccagcctggtctacaaagcaagttccaggacagccagggttgtcttgcagggagagagaacgctacttcatctccgaacatccacatggtgtctcataacgatctgtaaccccagttctaagtggccagtgtcctcttctgacctctatgagcagcaaggacatatgtggtgcagacaggcagagcacacgaacacaaaagaagccttaaaataaataaaaactattagaggccacaagatagtgatcagctgcctagagctcatgaaaggccatcacgaccaccatataaagccagctgtggacaagagcctgtaattccgtacccaagaggttaagatcagaggagaagttcaaagccatcctcaggtaaatagcaggtctgaagccaccatgggtcacatgagaccctgccccgccccccaaatttaaattaaaaacaaaaacagacaaaaaaaaaatgaagacaatcacgtagggtgcagctaaaattgtatttggaaatgtgtgttgctaaatgcatattagagaagagcaaagggcgaacatcagttatttaagcagctgcctctctcactgtgagttcaaggccagcctggtctccatagtaaataaattcaaggacggccaaactacatagagagactcagttctggggagtgggagggtggggagggaggaaggaagaaaggagaagggagggagggaagaaggaagggagggggagggagagaaaggaannnnnnnnnnnnnnnnnnnntgggaccaaagtggaaccttgttgtaaggactgaggctcgctgatcccctaacaagatccatcagagtagggaaggatgagcatgatggaggagggagagctatgactgggtgtcagaaagcaggagggatgcaagttcagagccagcctgggattcatagtgagacctcctctcaaaaagaaaagtagcataaatttacgcatgttttagaggccacacttaaaccccagcactctaatacactcccaatggaaacatatggtcttgatcatggtggtgggcatacgcatataccaaacacaatcacatacatgttacacgtgttacatatgtgtggtgtttgcaggtcacacatgcatcaggagagcagtgtttagattttgaacaaaatgaacaaactccttattggtccccaaagcatcacacacgggtgacaacgtggagcaaaaaagaattcctgaaccacgtgcaggaatggggacaggaaaaccccagcactgagagtgttcacctgggtactgagagacaggttcaaaggtgcggacagcagaatccgccacagtaactgcagactggaaacgccactggtgaccaccagaagaacttataaacagttacttctgcctaggaacagtcacaaaaaattccagaagtaaactatttataagtttaaagttgctgttgcgtgtcttgatgaagtctgggaacctttgctgcctctggctgttttccaaatgcccgcccacccaggacctggggagggggcagcggctcctttgtctccattatcagttgttatgttgattcactttcattatttagaggctttggtgatggcttccagaagctgcaaggagcaagatacagaaacaaaccagacagaaaactggctgggaaatccagatgtcctctagtaaaccagccgggaggtaagagatttgccaaggcaaagcaatccgccttccttcccatgaatgctttagttggtcttacaatcattctttggggaaatatctcactatcacgccaatgggctccttgctgttgtattctaatgagttaaacattatttcggtttaatttatacataaatgtattggtaggtgtaatctacatgagcagatctttcggagttgctaagtagttttttatggtacaaaaatctgttgatccctgcagcctgcgaacctctgaactccaggccagtatctgggcagatggctctggtttctggtctcagcctctgggttatcaatgcttacaacagaggcttagaaacagggttctgagacagagagcctcctagatacattccagaaagagagcaacctggctttgactaattatgaagctcagccctttgaaagtttgaatttaggaaatgagtcccctccattgattcacacaggatagcactcagatggcccacttgtgatggtggctgcagttgatagaccaagtggtccaggattaggacagtcctgacactggcaaccaaccccatttcatttttgtttatgtttttttttctttttgttgttgatgatgatggttgttgtttggttggttgggttttgtttgtttgttttgtgtgtgtgtgtgtgtgtgtgtgtgtgtgtgtgtgtgtgtgtaaaagggtctcagaccggggtataatgggtatatcttttttttcttttttttctttttttttcaagacagggtttctctgtatagccctggctgtcctggaactcactctgtagaccaggctggcctcgaactcagaaatccacctgcctctgcctcccgagtgctgggattaaaggcctgggccaccattgcctggcaatggggtatacctttaatcccaatgttcatgaggcagagtcaagtggatctctgcacttgaggctagcctggtctacacaggaattccaggccagccagggactaggttacatagagttgtgagtacccatatggttgctgggaactgaactcatgtcctctggaagaacagccggtgctccctactgttgagctgtctgtctacccacctcgctgacgccttcccagacacttccagtcatgctggcctaacagatacctgtgtctggcaagtctattaaaaccataactgtgtagctctggggttctggggttctggggttccatgtgctggcccaagagggaagcagagactgggaagcaaaatggggtgctttccacctctagaaacttaagtccctctccatttgctcccagcttccagacacctccttgtttcctgaaccaccccgccccatgtgcctgccccaaaaggaggtgaacccaaggcccagcccgttgctacctgagtactgtgtgctcattggccttccttcctacattagaggcagtcatttgactgaatactttgccaaggcataatgagagcctccagctgtcccccacaatgggcaaccccttcccacctgcctcctctaagtcagtgctgcagggacccgtagtgtctccaggatgcatgtctacctgagcaggaaacgcaggatgatggacaggaagaggcggcgccccgtgctctgtcccctgcactcggcatacatctgtgtgacagtgcagtcacccaggaaccaagggcctaccttgccacaaggccctagctgctgctagagtgctgtctcccacctcagccaggtggcgctgctggaggagaactgcctgtgtggctcggattgcaggtcaggaaagccttcctagtgcctccctcctgtcatgaaagcccactacatggggcctctagagccaccgtctcttaagtcatttgaactgtaagtgagataacactggcagtgtagacaatgttctctgagaacagggattttggtttctccctagatggatggtgaagaagtgtttattggatgctgccagcagctcacagtttctggaagtgggaagcactcagtagctgacaggcagcattttcttttatgataagaaacgccaggaaggctaatgtagctccctatctgtagttccggtgtctgcttgttcccctccgtcacaagaaggctgctgcagttcctgctgttgcatcaaggtctgatctcatccagagcacagctcagagtgggatcttctccagagcccccctcactttgccatagccaggcctgcttcacacagctgttctcaagctgtcactggccaggagtggggtctgtcatcccagcaagcaggtcaggatcccatgaccctggaggagagtaggtaccaagtccattgatgaagcagggtgggcagcaagcaacatgcagtggtagaagcaagggccaagcctgctgggagaggcgtacctgggcatgcttaggacccacagctggggaggctgcacagagcaaaggaacagatctcagggaaaagcatgtctgcccatggaaggccaggagaggagcccactgtagccacaaccctccccagctcgctctcctccagggtatgcacactgtgcatgcgcacacaggcttcacgctacacacaacacacacacacacacacacacacacacacacaaactgcacagtgtgcgcatgcacacaagctacatgctgcacacacacacacatatatgtgtgtgtgtgtgtatactgtatacatacatgtgatctacatgctaaatacacacacatatgagctgcacactgtacacatgcacacaagctgcatgctacctatatatatacttgtgtatatatatatactgtatacatacatacacactgcatgctacatatatatacatgtatatacatactgtatatacacacacacaagctgcatgacacacacacacacacacacacacacacacacacacacacacgcacaccggagctacccagctcacctcacggatgcttctccatctcccagagtcagcttaataggaaacagggcttggtgggaacaatttatgacaacccaagccctaaaatgaaaacatctgtccctgacatggctcagccgctccccagcacagcctggctcctgaggggcccaccagccctgtggggacagcagaatggaagagccctcagtcagagtttctcaaggcttcctgctgtgtagccaccacgtcatggcctcctagccttgccatactgaccactgagggctgcgactagccaaggagaccatttctcctggtggagacaggctccagcccccaagagcctctttgctctccagctgcccctgtgcaggacctgcctgcccaggtcccccaccttcattccccaagccctgatggctgctatctccttcgaggccaggttcagaaacagcctttaccaggctgat

SEQ ID NO: 112 - DNA, 1766 bp, Mus musculus
taggttctgactctgaagaccttctggaagagttgctctgcagcttggtacagttaatcactgatactccactcttggatatcacgtatgagatagcagtggaggccatctcggcaatggttgtcttcctttcctgccaactcttccacaaggaggttctgcgacagagcatcagtcacaagtacctgatgcaaggcccatgtcttccctacaccagtaaacttgtgaaaaccttattgtataactttatcagacaagaaaagccacctccgcccggaacccatgtcttccctcagcagtcggatgggggaggactgctgtatggactggcatcaggagtagcaagcggggcaggcagcaaagcagctgcgtccccagaacttacatctcctctggccaaccagagtctcctgctgctgctggtgctggtgaacctgacggatgccccagacatacccaacccctacaggcaagctgtctcgtcatttaagaacacgcaagacagcagtccgttcccatcatcaattcctcataccttccagattaactttaacagtttgtacacagccctgtgtgagcagcagacgtctgatcaggcaacgctgctcctgtacacgctgctccaccagaacagcaatgtcaggacgtacgtgctggcccggacggatatggaaaatcttgttttaccaattcttgagattttgtatcatgttgaggaaagaaactcacaccatgtctatatggcccttataatcctgttgatccttacagaagacgatggcttcaatcggtccattcatgaagtgatattaagaaacattacttggtattcagaaagagtcttaactgagatttccctggggagcctcctaattctggtggtaataagaaccatccagtacaatatgaccaggactcgagacaagtacctgcacacaaactgcctggcggctttagcaaacatgtcagcgcagttccgctccctccaccagtacgctgcccagaggatcatcagtttgttttctttgctgtctaaaaaacacaacaaggtcctggagcaagccacgcagtccttgagaggtcccctgagctccagcgatgtccctctcccagattatgcacaggacctcagtgtcattgaagaagtgattcggatgatgctggagatcatcaactcctgcctgacaaattctcttcaccacaacccaaacttggtgtacgccttgctttacaaacgggacctctttgagcaattccgaactcatccctcattccaggacataatgcaaaacattgacctggtgatctccttctttagctcaagacttctacaagctggagctgagctgtcggtggaaagggtcttggaaatcattaaacaaggggttgtggcgctgcccaaagacagactaaagaagtttccagaactgaagttcaaatacgtggaggaagagcagcctgaggagttcttcatcccgtacgtctggtccctggtctacaactcagcggtcggcttgtactggaacccgcaggacatccagctgtttgccatggactcggactgaagcaggacacagccacgcccaccccagccacgcccaggagcagaggcagacagactgcggcaccacagagggtcaaacaagcgtgcttccctcacacactgtgactattgggagactgcgccagttagcagtagttcactcagccttgattgtactgcaagggcgagacaaaaataaacgggaaacgtgctgttcaacatg

SEQ ID NO: 113 - protein, 508 aa, Mus musculus
GSDSEDLLEELLCSLVQLITDTPLLDITYEIAVEAISAMVVFLSCQLFHKEVLRQSISHKYLMQGPCLPYTSKLVKTLLYNFIRQEKPPPPGTHVFPQQSDGGGLLYGLASGVASGAGSKAADELTSPLANQSLLLLLVLVNLTDAPDIPNPYRQAVSSFKNTQDSSPFPSSIPHTFQINFNSLYTALCEQQTSDQATLLLYTLLHQNSNVRTYVLARTDMENLVLPIILYHVEERNSHHVYMALIILLILTEDDGFNRSIHEVILRNITWYSVLTEISLGSLLILVVIRTIQYNMTRTRDKYLHTNCLAANMSAQFRSLHQYAAQRIISLFSLLSKKHNKVLEQATQSLRGPLSSSDVPLPDYAQDLSVIEEVIRMMLEIINSCLTNSLHHNPNLVYALLYKRDLFEQFRTHPSFQDIMQNIDLVISFFSSRLLQAGAELSVERVLEIIKQGVVPKDRLKKFPELKFKYVEEEQPEEFFIPYVWSLVYNSAVGWNPQDIQLFAMDSD

SEQ ID NO: 114 - DNA, 440684 bp, Homo sapiens
  misc_feature (1)...(440684): n = A,T,C or G
gctcccctgctaaactcattagctatgtgatctatccaagcagcaagaagatggccatgccatggcaatcctcttcccattttccctcgccactcagggctcaacagcagggtgaggcttgcggggtggtggtggggggagcacaagggctactttcccccagtacaacatggcatctgatgcttgatgggagagcagaactggtgagacttgagggaagggtccagggcctgtattcagtcagggtcactgctggaagaggaggaggaagaggaggaggaggaatgcttgccatgcttgtggtgcttgtgcatctttttatgagctttcttcattttcttctacatcttcttgtccactatcactcctggtccaaccaagccaggggccaagggattcacaggaggcattccaggggcaggtggtgggtatggaggaaggtagggacccgaaggttggacaccctggctgtggcacaggatgagggcgtccacctggggggaaagctggattgccctggggagctcctgagggaggaggaaaggggctgggggaaagggtagattgacaggtggtgggtgggcaggattggaacctccagggtacccgatgttggggggatatggatttggccctggctgcctggcattgggattccacatgtttaggtgtgtccttcaaccccatcacctttccaccactgcctgggcttgatgtgttctctgtagaagattttttaaaatacagatagtataaaaatccttcctgacccctcatttggatattttttaatggtgccttttttttaattgttgacgttcaagatagactttaaacaatctgaaggaaaataaatcaatatcaatgacagtcatgcacactcaagcaatctgtttcaaagcctaatcatttgtcatctattctcagtgtttctattataatttttattataataatagtacaggctgaatccccagcacctatagcagtgcctggttcagagtcgatacttaaatatttatggaatgaacactaaatgttctctcaaaaaatgataattcagaaatatctgtatattgcaaaaagtaaaaggtcttccttaccctcccctgctccattctgatgattatgtgaaaggaaaagcctctatccttggtgaatctctcatttagcttttcttttttaagaagttgtgtattctggtggtctttaacagaagagggctatgtgttattgggggttcattgccacctgtaggaggcaaaataacctgtgatgagttggccccattgaagtaccacacctctaggaagccttcccttcctccccttctcttgcccttgtttctgcaagctctgtacaacacttcttatccgggtgaccttgccctacaggtagctggctacctgctgtgtctttcacaggatggtgagctccttgtagacagtgctgtctttatcttgccacctcccacagtgccttggagggtacagttgctaaacgttttggaactaaacagaaaaaaacacagtacaataagaaattaccataatgctaaatcaacaaattactcgaatctcttcccctgacactttagtagctcttgaaagggcaatttcagtgatcttgtcaaacagctaagtcacatggtgacctagaagagggcttggaagtttgagtcattgccgttcaatactctttcctctagacatcctgacccccatcctctgcaaaaccatgggcagtgcagagtaggtcacaagtattgtgtttttatttgtttgtttgtttttagagacgggatcttgctgtgttgcccaggctggtcttgaactcctgggctcaagtgatccccccaccctggcctcccaaagtcctgggattataggtgtgagccaacatgcctggcctgagttgtaaatcttccaggctcgtgccactggcttctgggagactataagatatgacctagtgtaaatggaaataatttttacctatttgggttcaaagacaccaataaatctgttcttggccaccgaggtcagttctatttcttcaaatcttgcctagagtagtgtttgcacctcatgttatgggttgaattgtgtccctccaaaattcatttgttcaagtcctaacccccagtacctcagaatttgatctttcaaaagacaaaattaggattgggtgtggtagctcatgcctgtaatcccagctactcaggaggctgaggcatgagaactgattgaacctgggaggtggaggttgcagtaagcccagatcacaccactgcactccagcttgggcaacagagcgagaaaaaaaaaacaaaacaaaattacaacaaatttaaatatcttaactgcttttatttacaattctagaatcaagcaacacctcatcctataaaataaaacgggtgttcccaagagctgagcagaggagtttggtccaatggagagaaaaaggctaaggaaagcggaaacagaaaacaaaaagtggattggttgtttcagagttactttcttgttaaggctgaagcagaggggatttccttatcatgccggctaaaactggcttctttggggatttggctattatccctcactctcttcatttctcagatggtcagataaacaaattagtttcaatttggtgacatggaaccttagcatgaatgactccattttggttgggcctagtgcaggagctcagtccaagccaatggccgcctataaattttatttaacaggctttatttggaaataggtacattgtagatagaattaggttataatgaagtcaccagggtgggccctaacccaatatgactggcgtccttatataaagaggaaatttctatgtaaacacacacacagaggaacatgtgaagatgaaggtggatataagggtgttccttctacaagccaaggaatgccaagaattgtcagtagaccagcagaaagtaggggagagcatgaaacagtttcttcctcgcagccctcagaaggaaccaactctgacaatgccttgattttggacttttggcctccaggcctatgagacaataaatgtccactgtttgtggtactttggtatggcaccctagtaaaccaatatacccaggtattacagtcagatattacagtccatgttagctggaaacacaagctaactctgaggaagccaagtgtgagtcttccaacactggcagtgttggcaaaaggagctctgggacagccttttccagtgagtgacagtgtgggctgtgcagctagactgctggtgtgtgagcctccactggctagctttgcaatgttgggaattgtatttaacttgttgcggctgtacaatgggggacaataaataagtaccttgtcttagtccttttgagctgctataacaaaataccacagactgggtaatttacaaagagcaaaaattggacaggcacagtggctcatgcctgtaatcccagcattttggggtgccgaggcaggcggttcacgaggacaggagttccagaccagcctggccaaaaaactccgccttaaaaaaaaaaaaaaaaaaaagcagaaatttatttcacacagttatggaagctgggaagtccaagatcaaggcaccagcatatttggtgtctggtgagagccttcttgctatgtcctcacatggaggaagggcagaggggaaaaaaggcctaggtagttctctcaagccccctgctttttttttttttttttttttagatggagttttcactctcgttgcccaggctggagtgtaatggtgcagtctcagctcactgcaacatccacctcccaggttcaagtgattctcctgcctcagcctcctaagtagctgggattacgggtatgcatcaccaagcctggctaattttttgtatttagtagagatggggtttcaccatgttggtcaggctggtctcgagccctcttataaggctagtgatcccacttgtgaggagggaggagccctcactccactcaatcacctccccaaagacctcacctctttttttttttttttgagacagagtttcactcttgttgtccaatctggagtgcaatggcactatctcagctcacagcaatctctgtttcccgggttcaagcgattctcctgcctcagcctcctgagtagctgggactacaggcgcacgccaccacgcccagctaatttttgtatttttagtagagacggggtttcaccatgttggccaggatggtctcggtctcttgaccttgtgatctgcctgcctcggcctcccaaagtgctgggattacgggcgtgagccaccgcgcctagccctggtttggtttttttttttagagacagggtctcgctcagttgcccagattggagtgcagtggcatgatcatggctcactgcagctgcgatctcttgggctcaagcaatcctcctgctccagactcccaagtagctaggactacagctgtgcaccattacgcccagctatttttttggtagagatgggggtctcactatgttgcttaggctgagctggaactcctgacctcaagtattcctcccttctcagcctccaaaactattggaattgcaggcatgagccactgcacctagcccccatgttaactattattagtttgtgacttttcctaatttgtcccagacaggaaggagacagtgacagctgcactgtgccccctccctaagttctgccatcagaactgctcctctgacatcttttctgatggccagaaggccaccaggacccatagtgatcaggctgtctcaacctctttccccaggctaggctaagggctcaggaaaaggaagaatgaatgggggctctgtagagtgcatctaagctctcctgcatgcaggagggactggagaacgaactgtgtagcttcttaccttatcaggcaggcaatacccaggaatgctggagtcactgcttttggagcattcaaactctctgcagcactttctgagtcttgctgctaacagctggccttgcaaggaattcattaccatagcaccacaggaggccttagaggacgccggttcaggagcttgctcagtcatttgtgcagctcactggctgtgcatctctgtcggaatcctctcatgtccctagaactcaaatcactaacattccctacgctgttgtaactttattttactacctgttcagccagcctctgcttgaacacatgcagtgattgggatctcatttctcttccacatagaccatttcactactagtaagcttaatttcactgaaccacctatggtgaagtgattcctgagtcattaaataactttctactgcaccctttctcatagggttatttggagacttaaataagataacagtgccttgctcacagaaaacagcctgtaatgtgaattgacaattattgctgctgatattgttttcagaaagttcttatatggagctgaaatctgcattctgtaacttcgaaaacttggtcttaatttggctcattggcataacagaaaataagtctaatcatgcccccctgaggatggttctacttatcacaagtctcctcttagtctagttcttcatactcagttccttcagcccttccacatgggacgtaatttccagatctctcaccatcctgactgcccttccctggacaggttctgtttgaccttcatccctccttggaggagtggccaggtgctggcaactaagacatgcgagctgtccaccatctggattatgcagatgaactaacattgaaaatgacacgctacatgcattacttaatttcgttctcacagcaccttcatgaggagaaaactgaggctcagagatgttaagtagctttccccaaatcgtttagctcagaaattgtggaaccagaattcaacccagatctgtctgactccaaagtctgctcttctttcttggggaagtggaagcctgagtgctgttcttggaacagcctcaagacaataatctggggactgtcttggtcctgcttgcagagggtccttctgttacgtatgggtcctttctggccctttagcttctacaaagaaagtcagtccccctccagctctaaagacacatgaagtctgtttgcagtccagaccttgcaaacttgtagttatagaaacctcagaggcctaccagggcttgaaggatatttggctccactttacatctccattcttcttttcctcctgtttttaatgtaacctgtaatcctagcaatttgggaggctgaggcaggtggatcacctgaggtcaggagttcaagatcagcctggccaacatggtgaaactccgtctctactaaaaatataaaaattagctgggctaatttttaattagtgtggtggcccgcgcctttattcccagctactcaggaggctgaggcaggagaattgcttgaacctggaaggcggagattgcagtgagctgagattgtgccattgcactccagccttggcaacaagagtgaaactccgtctcaaaaaaaaaaagtattctgtccaccacgtggaataatgtaatatttagtaataagaacagctgcaaggtgtagagagttaccgtatatccatcacccagctttccttaacgttaacattttatataaccacagcatcattttgtcaaaactagataatcagcattggtacaatactgttaactaaactctaaacttcatttaggtttcatcaggctttccactattgcctttttcaattccaggatgcagtccaggatatcctattggatttagtggaaggatttcatacattttctattgctgttcctgcactaactagacactgaagttgtcaagtcagccaaagttannnnnnnnnnnnnnnnnnnnnnnnnnnnnnnnnnnnnnnnnnnnnnnnnnnnnnnnnnnnnnnnnnnnnnnnnnnnnnnnnnnnnnnnnnnnnnnnnnnnnnnnnnnnnnnnnnnnnnnnnnnnnnnnnnnnnnnnnnnnnnnnnnnnnnnnnnnnnnnnnnnnnnnnnnnnnnnnnnnnnnnnnnnnnnnnnnnnnnnnnnnnnnnnnnnnnnnnnnnnnnnnnnnnnnnnnnnnnnnnnnnnnnnnnnnnnnnnnnnnnnnnnnnnnnnnnnnnnnnnnnnnnnnnnnnnnnnnnnnnnnnnnnnnnnnnnnnnnnnnnnnnnnnnnnnnnnnnnnnnnnnnnnnnnnnnnnnnnnnnnnnnnnnnnnnnnnnnnnnnnnnnnnnnnnnnnnnnnnnnnnnnnnnnnnnnnnnnnnnnnnnnnnnnnnnnnnnnnnnnnnnnnnnnnnnnnnnnnnnnnnnnnnnnnnnnnnnnnnnnnnnnnnnnnnnnnnnnnnnnnnnnnnnnnnnnnnnnnnnnnnnnnnnnnnnnnnnnnnnnnnnnnnnnnnnnnnnnnnnnnnnnnnnnnnnnnnnnnnnnnnnnnnnnnnnnnnnnnnnnnnnnnnnnnnnnnnnnnnnnnnnnnnnnnnnnnnnnnnnnnnnnnnnnnnnnnnnnnnnnnnnnnnnnnnnnnnnnnnnnnnnnnnnnnnnnnnnnnnnnnnnnnnnnnnnnnnnnnnnnnnnnnnnnnnnnnnnnnnnnnnnnnnnnnnnnnnnnnnnnnnnnnnnnnnnnnnnnnnnnnnnnnnnnnnnnnnnnnnnnnnnnnnnnnnnnnnnnnnnnnnnnnnnnnnnnnnnnnnnnnnnnnnnnnnnnnnnnnnnnnnnnnnnnnnnnnnnnnnnnnnnnnnnnnnnnnnnnnnnnnnnnnnnnnnnnnnnnnnnnnnnnnnnnnnnnnnnnnnnnnnnnnnnnnnnnnnnnnnnnnnnnnnnnnnnnnnnnnnnnnnnnnnnnnnnnnnnnnnnnnnnnnnnnnnnnnnnnnnnnnnnnnnnnnnnnnnnnnnnnnnnnnnnnnnnnnnnnnnnnnnnnnnnnnnnnnnnnnnnnnnnnnnnnnnnnnnnnnnnnnnnnnnnnnnnnnnnnnnnnnnnnnnnnnnnnnnnnnnnnnnnnnnnnnnnnnnnnnnnnnnnnnnnnnnnnnnnnnnnnnnnnnnnnnnnnnnnnnnnnnnnnnnnnnnnnnnnnnnnnnnnnnnnnnnnnnnnnnnnnnnnnnnnnnnnnnnnnnnnnnnnnnnnnnnnnnnnnnnnnnnnnnnnnnnnnnnnnnnnnnnnnnnnnnnnnnnnnnnnnnnnnnnnnnnnnnnnnnnnnnnnnnnnnnnnnnnnnnnnnnnnnnnnnnnnnnnnnnnnnnnnnnnnnnnnnnnnnnnnnnnnnnnnnnnnnnnnnnnnnnnnnnnnnnnnnnnnnnnnnnnnnnnnnnnnnnnnnnnnnnnnnnnnnnnnnnnnnnnnnnnnnnnnnnnnnnnnnnnnnnnnnnnnnnnnnnnnnnnnnnnnnnnnnnnnnnnnnnnnnnnnnnnnnnnnnnnnnnnnnnnnnnnnnnnnnnnnnnnnnnnnnnnnnnnnnnnnnnnnnnnnnnnnnnnnnnnnnnnnnnnnnnnnnnnnnnnnnnnnnnnnnnnnnnnnnnnnnnnnnnnnnnnnnnnnnnnnnnnnnnnnnnnnnnnnnnnnnnnnnnnnnnnnnnnnnnnnnnnnnnnnnnnnnnnnnnnnnnnnnnnnnnnnnnnnnnnnnnnnnnnnnnnnnnnnnnnnnnnnnnnnnnnnnnnnnnnnnnnnnnnnnnnnnnnnnnnnnnnnnnnnnnnnnnnnnnnnnnnnnnnnnnnnnnnnnnnnnnnnnnnnnnnnnnnnnnnnnnnnnnnnnnnnnnnnnnnnnnnnnnnnnnnnnnnnnnnnnnnnnnnnnnnnnnnnnnnnnnnnnnnnnnnnnnnnnnnnnnnnnnnnnnnnnnnnnnnnnnnnnnnnnnnnnnnnnnnnnnnnnnnnnnnnnnnnnnnnnnnnnnnnnnnnnnnnnnnnnnnnnnnnnnnnnnnnnnnnnnnnnnnnnnnnnnnnnnnnnnnnnnnnnnnnnnnnnnnnnnnnnnnnnnnnnnnnnnnnnnnnnnnnnnnnnnnnnnnnnnnnnnnnnnnnnnnnnnnnnnnnnnnnnnnnnnnnnnnnnnnnnnnnnnnnnnnnnnnnnnnnnnnnnnnnnnnnnnnnnnnnnnnnnnnnnnnnnnnnnnnnnnnnnnnnnnnnnnnnnnnnnnnnnnnnnnnnnnnnnnnnnnnnnnnnnnnnnnnnnnnnnnnnnnnnnnnnnnnnnnnnnnnnnnnnnnnnnnnnnnnnnnnnnnnnnnnnnnnnnnnnnnnnnnnnnnnnnnnnnnnnnnnnnnnnnnnnnnnnnnnnnnnnnnnnnnnnnnnnnnnnnnnnnnnnnnnnnnnnnnnnnnnnnnnnnnnnnnnnnnnnnnnnnnnnnnnnnnnnnnnnnnnnnnnnnnnnnnnnnnnnnnnnnnnnnnnnnnnnnnnnnnnnnnnnnnnnnnnnnnnnnnnnnnnnnnnnnnnnnnnnnnnnnnnnnnnnnnnnnnnnnnnnnnnnnnnnnnnnnnnnnnnnnnnnnnnnnnnnnnnnnnnnnnnnnnnnnnnnnnnnnnnnnnnnnnnnnnnnnnnnnnnnnnnnnnnnnnnnnnnnnnnnnnnnnnnnnnnnnnnnnnnnnnnnnnnnnnnnnnnnnnnnnnnnnnnnnnnnnnnnnnnnnnnnnnnnnnnnnnnnnnnnnnnnnnnnnnnnnnnnnnnnnnnnnnnnnnnnnnnnnnnnnnnnnnnnnnnnnnnnnnnnnnnnnnnnnnnnnnnnnnnnnnnnnnnnnnnnnnnnnnnnnnnnnnnnnnnnnnnnnnnnnnnnnnnnnnnnnnnnnnnnnnnnnnnnnnnnnnnnnnnnnnnnnnnnnnnnnnnnnnnnnnnnnnnnnnnnnnnnnnnnnncgtccacctcggcctcctaaagtgctgggattacaggcgtgagccaccgcgcacggctgtttttgcgcttctcgtttcgccacgtggctttgcggtagcccaggaggtactaggagggcggaggcacgaataacacccaaaggactacagtttccagaagcccgcgcgcgccgcgtgccacgtgaccacctggctggcgcgcgcgcctgggggtctggtccctagccgcgttctcggtcgcttccctcttctctcgccgcctcctggcctccgcaccgacgcggcccgggctggagccgagccggggccgagctgcaggccggaccggagccggatctgtacccgctgagacgtggaaacatggaggcctgagccggtgtgcgccacctgggctgcggcggcgacagcgacttctcctgacccctctgccaccctcccatccgtccgcgggtccgtggagctggagcagatcccccagccggctgagacaggtgggctgtagcgccgcccccctcagcgcggccgggcccgaaagcctggctgtccccggcctcctgtcagagggggtcaggggccaccctccgcaacccggccagcgccccggggcggcggcgaagggaccctcccttccctgcccgcgggcgcctgggccacccggaggggctgtgctgacagcggacggacctctgtccgagtccgctgttgggagttgggggataccgaaggccaagtcggtgcttccggagatggggcggtgttggtctgacaaatgggcgtgtgatgggcagggtgagcaatagctgttgggtttttctttcttctttttacattcatagtttatcgaggtataactaacatatcagaaaattaaccctttaaaagtacaactcagtggtttttagtatattcacagggttgagcagccatcaccacccttaactccagagcatttttaatcaccgccccccccgccccaaagaagctcgtacccattagcagtcactcctccttctctcccctacactattgatctactttcagtcgccgtggatttgcctgagcaattgtgttttgactgaaaagtgaaagggtgggtgtttgtgaactgggggcagtagtggggtttgagggtattggtgtggtaaagctgattggataaagctgttctctactgaacaggggtagagaagtgatgggatgattgtaatcggccagcaaagcgggtacccaggatagactgattagggggcacagatggagtgagttccttgaaagaggagaggggaagttggagagaggggtgtgtagagcaagggtgatgtgctgaaggatgaaaacctggagggtggaggccgtggagaggaatgtagcgtccaccagaggaactcaggtgcttaggctgatgagttgagggctcaagagaagaacgaggtggaagggaagagaatctataggaatgggtgaatggttgttgcagaggatgaaatttatgaatatatggatttctggagtgattatcctgctttgaagttttattttagataatcctctcagcaacttggagatagaccggacaagtatgaatattcccattctgtaaatgaagaactagtcttttagaggttaggtgtctgccttaagctcataaactgagtacatagggcaaaatgagttggaataattgatgaaactatcagtcgcaagtggattaaatggcagagaactgagttggggcaatgttaataggaaggagattcagctattaagaagtctgtgttgttacgacatataggtcaaggagtttttatgtttttgcaccttttaaccatagaaaagttcacacagtgaaataataaagggtactcccatgtacccattacccagcttcagcagttaactcatgccaatttaatttcatctatgtccctatgcattcctatccccactcacaattattttaaagcaaatcatagacattcaatttcatctgtaaatatttcaatatatatctgtagaagattgaattgcttttttttgttggtggtggtgggaggcagagtctcgctctgtcgttcaggctggagtacagtggcgtgatcccggctcacggcaacgtctgcctcctgggttcaagcaattctcctgcctcagcctcctgagtagctgggattacaggcacgtgctaccatgcctggctaattttttgtatttttagtagagacgggggtctcatcatgttgctcaggctggtcacgaactcctgagttcaggcatttcacccacctcagcctctgaaagtgctgggattacaggggtgagccactgcacctggcctgctctttttaataggcccagaataccattatcacacataaaaattaatagtttttaatatctagaaagatttactgtactttaaaaaagtgtggtaatccatttgatacaaagaggataaacagtgcaaacgcttttatgtttgactctgaaaaatgtggcataattatctcctgatttttccattagatcctgccatcctgattgttccttttttttttattaatatggctcatttttctacagaaagtttgaagaattgtcactttggtaggctttttaatgaatggagggcaggagagaaatagaagtgaaatatgttacaacatgtacaaatggctctttcttatattgctccaaatatttgggcaatttggttatgcttttctagataatttcacatattattagaagttgtttaatgttatgtatcagttttctatgattgctgtaacatgttaccacaaatttagtggcttaaaacaatgcatttattattttacagttctgtaggttagaagtcaaagtgggtctcactggctgtcaacaaggctgtgttcttctctggaggtttctagggggcatctatgcctcttccagcttctagaggctgccactttccttggcttgtggcgtacctcctctgtcttcaaagccaccagtgttgcatctctctgatcatacttccatcctcaagtctctgaccacaagtgggaaaggttctctgcttttaaggacccatgtaattaaatcaggcccacttagctaattcaggataaatcccccctcgaggttcttaatttaatcacgcctgcaaagtctcttttcccagcaacataatcagagcttccatggattagtatgtggacatctttggaggctattattctacctaccacagtgtattttggaatattttgccgagacttaagaaagtaggtgatttcttttgctgctgtacatgcaacgagagggccgtcttttacttaggattgtagataatgggaatggttagatctagagaagactgttcatttttccttttagtgaaatatgggaaatacctgtgacacttgtagtataggctttggtaaaatgagacctttaaaaatgatttaagtataaaagcaatacagctccatgtaaagtttttctatatttcgttttggtctctttttcatattcatgtcttaaaacatagtatatatgtgtaatcagagggctaacctgatacttgacacaggacacgctgggggcaatgatggttcccatgcccaggatgagaaggcagggactctctgtccaagtgggagataaaggcacccccatttcagcagcaaaagaagactcctaatgaaagtgagagaatatcttcaggcagaatgaactactgtgagatttggacttgaagcagcctcttctcaggttcttctgtgactcagctgggaatggtagagtgctgtgagcctagaagagcagagtgataagatgcccattgctgcttttcctttcttcggacagagagaggactaatcttaaagattgaaaggatttctgggagtcctccagtttggtatcctgtttcctagtgggtttcactttcctacttagctgtcaaagtccttactgtctctaggtgtgaaggttctggctttctggtggtggtgcaccatttatcaggaaatgtgatgggacttattaaatatctgctcttgcctttaagcatttttttttctagtaaggtttttagcagagctttatgctttgaactttgcttgtaaacagtttgtaagttatcctcacattacttaattctagacaaaatgaactagtggggctgggaacaactttacatataggtcttatttagtaaaagtttttgtttttttcatttcttaaggaagtttggttagtgattttggtatcttctctgatttttatcacattctttaaaaatgcaggcaatgaaagtggctgaaactttccaataaggacattggaataattatttttaaaaagcttatcttttcttttattgctcagtcttttgggcatttaaaaccttttgtccatcatatgatcgatgacaaatttctttgttaggttgagtcagtcactgaatcttgacaattattccttcaaaatatgtcatgcaaccctccacccagaatactttgaaaaccctacctgtatcagttaggcttaggtttggctatgaataacagagacctgaaaaataatagcttaaacatatgactagtttgtttcttttgtaaaagaagtccagaggtggacgattaaaggctggtttggcagctctgctgtcatcaggaacccagcctccttgtagtttcttacactgttaaccctaaagtatggcccttgatttctgggtccaagatggctgctggagttctagctaaaatttccatgttcctaacagcaggatggaggaagggataaagaagtgactgtccactcttagagacttaaatatatcttagttgaacaggaatatgcctggtcaaaaaaatggagttctgttactaaaaggaagagaggactggagattgggtagggaattagcattttttgcttttttttttttgagacagtctgactctgttgctcaggctggagtgcagtggtgggatctcggctcactgcaacctctgcctcccaggttcaagtgattctcctgcctcagcctcctgaatagctgggattacaggcatgcgccaccatgcccggctaatttttgtactgtttttagtagagttttcaccattttgcccaggctgtctcgaactcctgacctcaggtgatccacccacctcggcctcccaaagtgctgggattacagacaggagccactgcgcctggcctctgctcctttataattaatttctctgaacccagactaacctacatactttttgaaactctaggtttgagtcctagttctatcatttatttgctttggcatgttactcaacctttttgaacttcagttttcttatctgtataatgggactaatatatactttatatgtttgttagagaattaaatgaaaatacctctatgtacctagcaatatatacactataactattagttgtttttcattctcttcctttagatttctcgacttggatatctgaatgagtggtgtaaaaagatgagaattagagatggacaaggagaaggatgtatattcagttcagtattgagcatgtggagtttgaggtgcccttgggacatcagatggtgatagatgttaggcagttagataaacgggactgacactcaaaagacagttctgactagacatagatattttggattgtaagtgtataggggtagaattcatcaatctggaagtcttagggaggatgtatgcagttgtacggttactatgtgcggagtaagaaggcatgccctttagtgagtctctctgtaaagcgtcaagcctcagcttactttctggccttttctttattatttttatttttttgtgggttaaggagtggaaagtctaatagaagaaaggagagaggagagcagctccttgagagagagagagagaggtccaaaaaaggaggaggccatggaccgcagcagatttttttttttttttttttttttgagacagagtctcgctctatcacccaggctggagtgcagtggcgcgatctcggctcactgcaaactctgcctcctgggtctacgccattctcctgcctcagccacctgagtagctgggactacaggcgccggccacaatgcctggctaattttttttttttttggtatttttagtagagacggggtttcactgtgttagccaggatggtctcgatctcctgacctcgtgatccaccggcctcggcctcccaaagtgttgggattacaggcctgagccaccgcacccggcctgcagcagatttttatatggagaaggcagtgtctgatttacatagggctcacagattggttcgatcatgcatgacgtctacagagtgtgtggggaaggctggttgcctcaacctaatcttatgcaaatgggctttccagttgattggcaccatcctgtctgctcctttacagtacatgtggctggcagagaagggaagatggagccgccattttgaaaatgtctagtccttagtttctgcaggcattatcgtgtgcaagctcccagcttgcaggctgctctttgttagaaaatgatttggggctgcttttcattaaaaagaacagccttactgaggactcccatgcccttgctatctgcctaagtaattccttgttaactcctatatcatcattccctgctctggagtggcaaccctaactgctgttagggggtgttgggtgatgactctttctggctacttcctgctgaaaaggggcatcatgtggggatcagcagctagggctcctcctggggtcaatctaagggtccttggaagaaaggcatgtccgtgtgtggttctgtctgcagcatcatttggagtttgattctgttgctattctgatgggttgtaacactggtttgcctccaccagatgttgttgaaatgttaatataaaagtaacattccttttaggataagtggcattggatttgggtggctggagtaactttagtgttaaccttggctagatctttcctgcagttatcaatcccttcatgacttccacagaaaatctctttcctttataaccttctttgcatagccagggtgtgacatattaccaaacccaataagaagttctagcaaactcggtgttagtaaaactttcgtgcttcctttttgttggtaattatccctgctatcaggataataattaagcaaattctacaacaatgaaaactctctttccagtatttcagttagaaggtgctattgtgtccagaattggtgggttcttggtctcattgacttcaagaatgaagccacggaccctcacggtgagtgttacagttcttaaaggcggcgtgtgtggagtttgtccttctgatttcggatgtgttcggagtttcttccttctggtgggttcgtgctctcgctggcttcaggagtgaagctgcagaccttcgcagtgagtgttacagctcataaaggcagtgtggacccaaagagtgagcagcaacaagatttattgcaaagagcgaaagaacaaagctcccgcagtgtggaaggggacctgagccggttgccactgctggttggggcagcctgcttttattcccttatctggccccacccacatcctgctgattggtccattttacagggtgctgattggtgcgtgtacaatccctgagctcgacacaaaagttctccaagtcccccctagattagctagatacagagtactgattggtatatttacaaaccctgagctagatacagagtgctgattggtgcatttacaaaccttgagctagacacagggtgtggattggtacatttacaaaccttgagctagacacagagtgctgattggtgtatttacaatcccttagctagacataaagattctccaagtccccaccagattagctagatacagagtgccgattggtgcatcctcaaaccctgagcctagacacagggtgctgattggtctgttcacaaaccttgagctagacacagagtgctgattggtgtatctgcaatcccttagctagacataaaggttctccaagtccccactagactcaggagcccagctggcttcacctggtggatcctgcaccagggccgcaggcagagctgcctgccagtcccgcgctgtgcgcctgcactcctcagcccttgggcggttgatgggaccaggcgctggggagcagggagcggcgctcgtcagggaggctcaggccacgcaggagcccacggcagtgacttggagaacctttatgtctagctgagggattgtagatacgccagtcagcactctgtgtctagctcaaggtttgtaaatgcaccaatcagcactctgtatctagctaatctggtggggacttggagaatctttatatctagctcagggattgtaaacgcaccaatcagcaccctgtcaaaacagaccaatcagctctctgtaaaatggaccaaatcagcaggatgtgggtggggccagataagggaataaaagcaggctgcctgaaccagcaatggcaacccgctcaggtccccttccacactgcgggagctttgttctttcactctttgcaataaatcttgctgctgctcactctttgggtccacactgcctttatgagctgtaacactcaccgcgaaggtctgccgcttcactcctaagccagcgagagcacgaacccaccagaaggaagaaactccgaacacatccgaacatcagaaggaacaaactctggacatgccgccttgaagaactgtaacactcactgtgagggtctgtggcttcattcttgaagtcaatgagaccaagaatccaccaattccagacacactgccatgtataaccctactgcaaatagtagagtgagtatagcaattcccacaagtgtggtgtagtagatactttccatctaaaattttatttgccaaggtatccagatttttgtgttacccatctctttttgtttcttgtaagcttcaggagatcaccacttgattcacaggaataagcagtgttagtctaaaatgtaggcacacaacttaaaaacaattaatgtgactaggatttaatgacaaatgtatgataagctttggagcatattttctctctctagtcctgattttggtaaaaacaaattatgataggaccgtgttgtttgtagaataaaccttagtcttatatttggccttgttatttgcataaagttcagcaagagtaattatttctgcatagtccttttggattggcttcgatggaactctgttccacaagaaatctcagataagacttcttaaagctgagcccagcatgggtttgtatcttcaaatacctgtgagttgggtgatccttttctcttaaggtcccaagataaacttggagctcctggacctgttagaaagtgacattctttactgaccaaaggttaggaaccctgtgcggggactgtgtagacaaggtatgaggccagttcttcccatggggctttttcagctctgcaagtggaggttgactccttaaagggaagcatacacttccagtcaaagccttgataaaatagccagtttttccatttgtgtcctgttgaaaaagaaaaatggattcttatttcactgatgcaaacaactatattgccataagttaagagttctcacagattagaggaaccaggcagagagaaacaatcatgcttcaagttttgttcacaggagtataccttactcaattattaaaggctgtaaatagttcaaaataagtttccttgactctgaaaaacaaaccaaggatcagcaatattccaagcagaagtcaaaaagattgctttagctttctgagtgtagtccatttagtcaattcttgttttgcttgatatttgtgaacatttcagttcatgagtcctgtacgttctttctctcttccaatgttacaatcttcaaagctgttaaaaacctgcatttgaggacacctgttgaaagtccttaatatagcttgattataaactgtcttttcagaaggaacaaagcaaaacaacaattgtctgtgcatgacaaaatttccaggttacagttaaaaacatgacggaaaaagtttagttaaccttaattatgattgatagtatatacttagacattagaattttagaaatcccatacaattttggaacatatattagtattattcaccaaaatataacttaaagaagattggacatcgttttggcaattctaatgtgactaaacatgtcagataatcctgtttacctcttctctggatgtttcaggggccttctgaacaatccagaaagccaggcatcaggaaggacaattttgaaacttgaagcttgattttgggatgccttttaaatgttagaggtttaaaacacttgatgttatgaaatagaattccaaattgccattatttattttgccaaaatgatgtcacaaaaggaaaaaatctttcatcatcctttactattacatgaaaatcctgtttaaagccaaattttacccttgtattagtttattaaagttgtaaacaaccttttgataaaacctcataggaaagttcacctaatcttaaccaatgaccatggggtgaagtctttacaaaccctttacaaccccttttgttaaacggcagattagtgtcttaagacagccttgccgtgtttttctttcaatgctcaatttaggaaaagaccatataatacccttttgaatttagttaatgtttatacatttttgcaagattaatttttgtcttcctgtaacttgcttaaacctttagctctgtcttattaaatttaagataatctcttatccctgggcaaaatttatattttcatgctttcttataatcttttactaaaaaacacatttcactgtttttataagccttgcatataaaactttagagatctcaaatacatgttgcactgttaactctcagcaacttttactttaggtaaaaaacctggttagtaagtgattttaattatataccaggtgtggagtctaggacccagacaaagtcaggcttatggggtcctgggcctgcatcctaacctaaggtaccctttcttttgacagaacgctacagaaagacacacaaagcacaccagattggttacagcttaagaccaacctcacaaattcttttttattaattaaaactttacagagaataaacaatcatccttattatccttgttactggtttgcacaggaagagataagccaaaatgttgactggtaaaaaaacttttacccttttgccagcatgtcaggcttctgggttcccttcccattagctcaactctaagtcaaccattttaaggtttggggaaattaacttttcctactttggaggaacattatacaggaagagataggaaccattgtacactgtgaaagaaggaaaaacaccatagaaaagtctggggattccagttagggttgtcaagaggtaccgcctctcttcctattgggaattgtgtttctcttatttctttgccttccctattttctcttttcgttttaggcctactataggaaacgttgcttatctttcaatttctttgctgcctgctcttcagctgtaattagggtttggcttagaagcaacataaaatctcttcatgagaggtgaaacacctgagttaaattttggaaagcttctatatacctatcagggtcttcagaaaattggcctcagtcacctttatttgcctaaggtcttgcaaagaggagggaacttgaaccctagtgacatcacctccattgggcatttcctgtagaggtaagagtgaaagtggggagtgggaaattttggagatggtggaggtggaagaactggtggtatggttggaggtggccctaaataagggggacttgaagggctgggacacccaatagctgcctcagatgatttccccagaagttgcttctctcattttggggaattattctctttgggcctgctcaatatgattgctaaaagggctgggttaattctgtaacgcttgcaaaggtctagtaaaaaggccatgccctgtgcaaaagaaaatgagctgctttttaaagtttcagggtcaaagaaatccttgtgcttcagaatgcactccaggggagtgcaggatgaagatggtacccacttagagaaaaaggtggccctttagtctccttccttttggtgtgacccatggtggagaggaagcagtgggggcatcccccctgcttttttccccctgtgtttcctgggtcccaggcaccttgttgaacatgctgcccatggttgcaagtgtgacccccagtcatggaaccagaggaactaagtcactggggctagtcatgctcacccaagtggctgtagtcctctgcctgtgatttccctttaacttcctagacttgtgtgacttgcctggcttcctgaaaaatggatttcaagaaaaactacataatagttgggcaaggcccctttaatgcaggggatgtgctagattgaactctgtatcctgctattatggcctgtgctgaagcatttacccttagataatggttccagttaacttccaaacttaaaattcccttactaattaagtactactctaattgaaggcagaataggtggcttaaaaaaacttagggattgaatggccattttcctgctgatgagacagtattgagactaaattttggctttggaggaatattttacccctaattgttgaaggcagagttttctcatttacagaaccagcataaagcctggtttctagtagagaggcacaaaaaggaaagagaattgggaggctaggatgtttcgttggactgacagtgtgcttcatggagaggattcctatttcactaggtggcgctgttgaccttgaaacaccacatactctctagaccaagggcagagagagacctggaaaatgccatgtgctctccagaccaagggcagagaaagagagattctcactgttggggggtcagggagccctgttcttagaaaatcacaaagacgcttccccttgagctatatgccttgttactacgacattccctgatcttaccaaacaagactacttccctgaaccataaaacttcccacacatttcatacagagaggataagagatatgacggttgcgaacaggagaggaggagattacaataggaaagttggagatcctgttgccgacaccgcattggggcggttggcggctggggtccagaagcctttggataacaccagggggtagcgccggccagaaatcctcagttgccccaggacttcttccagccccacacgacagctaagtcctccatgaaaggtctaaaatggaagccgagaaccttggaatgaaaggacagagttagagttcgctcttccccttaccgttcttatgaatgttgtaccttggtatcccggacaaagctgccattatgaagtggctacactatctggggtgtataccctagggtttgttgttgcctgccgagaaagaattaggacacggacatgtgggtgggttaaggagtggaaagcttaatagacagaagaaaggagagaggagagcagctccttgagaaagagacgtgttcgaaaaaggtactttctggtctcttatgcttctgctttgattccttttctgttccagccatgttaaacttctttcaggtccttgaacaggccctacctgttatttcttaaccacagggcttcacacgtgctgttctctgctttggaagtttctgaactcccacatccacccaggccaacccttcttgtcctttaggtcttaacattttttttttttttttgtgatggagtcttcctctgtcttgcccaggctggagtgcagtggcgtgatctcagctcactgcagcctctacctcccggtttcaagtgattctcctgtctcagcctcccaagtagctgggattacaggcgcctgccaccacacccagctaatttttgtatttttagtagagacggaatttcaccgtgttggccaggttggtctcgaactcctgacctcaggtgatccacccactttggcctgccgaagtgctgggattacaggcgtgagccactgcacccagctggtcttaacttttatggtatgaactcttggaagctttcccttggaagcttgaatagttgccatcttaacatttcttgttgatgtatccgtatctctgtatatcattcccttcttcacaactttaaccttggcactttgcatactgctggccacatagtgggcactcaggaaatatttattgactgttgataggcttcttgcgcttaatgtaaccataatgtgatgtagcttatatatggcttatttggtttttcaaccctgnnnnnnnnnnnnnnnnnnnngaattgtttatatgaatcattgattatgaaatagtaaagctcattctctcttatttattttgatattttttctacttaaagtaatacttgtatattgttagaaaaggtaaataataataaaggcaggttataaaaaatcagcagtatccttacccatccccactttttaatctcattttcagaggcagttacttttaagaactctgtctctctctctctctttttcttttggtagagatggggtctcactgtgttgcccaggccgttcttgaactcctagcctcaaatggtcctcctgcctgggcctcccaaagtgctgggattacaggcctgagccactgcacctggccctaaaaattcttttaagctttttcttttgattcttacctctgcgtttataaatctgcctaaattgctattttgtgatttatcaattttagataatacatattaacttcttgttatggtaggtggggtattcttccctttccttcccctatttctaaaagcacttccagtataggtatataagaattcttggttaatatagtgtttagcttttatattattatgactacataaatattgttcactgctggtgagtacttcaccatgtttccccttccctccccctagtttgcttagttttccatggatatattattaatttttaccaaatactttgaacggcctgtgggatttagtgcctaagaaattgatgcaaggtgttactctggctactgctattgcagttgttttgtgtccctgttccagaggtttcatgcctttttcagctttgtcagtaaagtaaaatctcagatccccaccatgcctgacttgacagtgtaacatcccccattttgtttgtgctttctttttggaactgttactattaatatattaaaatcttctaaattgttctttaaattttctattttttctcctcctgtttttcacttatttgtcctcttgttctttattatgggagttcccttaacttttatcttttctccgttcttttgttttaaatttcaggtgtcctttcttgttctttatttccttttttatgacatcctactcttgcttcatgaagcaatatgaaacggttaaaagagaatggtttctgtacctatcctacctgggtttaaaacctgatgtgccactttctagctctataatcttgggcaagttacttaacctttctttgctttagtttattcatgtaggttaggagttggtagacatttcatctaaaggaccaaatcataaatatttcaggctttatcagccaagaggcaaaatgaaggatattttaaattatttaattatttcattatgtaagtacttacataacaagagagaaaacatttctacaagttttttattaataaagctcaaaatgcgatactaataatgattgagaacaatttttgcaataaaggtttgctaatgagaagaatgaatgtttttttggaggagaggggataacatttggcttaattggagtttaaagttagtgttctctatcatcaaaattgattatagatgcagcattaaccacctattaatgctgatttgtaatgagatttcatgtatttcatctttgaaaatgtcttcttagatactgccaaatactgctaatagtctgtgaacatatggttttaatagagcatattcattgcttggacgacatttacagaattcttttagactcttttcttgatacttaacgtttagcaaatcattacactgcagactaatcacttccaattgaggattaggtagaagctcctcattgcacagttaaatgatttttgaaatgtggaatgttcgtttctacttgcattgaggtatgaaaaaatactgctggaaatatttgattttggaaaatatgtctgctgcatatttgtgtggcagtagagatcttcttattttaatttttgacagcataggaagtacatgaagcatcttgacatgacttgtgacttaggcaatgttagttgtccttgaaatgactgtctcaatataggttttgcacgtagaccctgttgtccttctaactttaggctgaattcattaacagatatatcaagtctgcagcaacaatagtagttgagggtcattcttttcattcagaaaaatttgtctcagcctggagcttgaaacatttcagtaaaactctgccattgttaagccattgtattgtttcgtggcaggacgcgtcaggatatttagcttctatttctgacaaaaatgtcatgagaacaaatgaaatttacctgtgacattacggttcaataacacatgatagattcagatgttttctgcagagtacctgctgattgagaatatgattaatagccataagctttaaacaccttacatttcacaaggcttgtaaattttgtccagctaagcctttttctgcttcatacatatttttaccaccatcagttgttacacatcttagcagattctacttcagattgtgctgaattagtatttccttgattttttggaaaatattcatagctgtaattgtttcatacatactgtacttcgagccactgttttcatggaaagagtaggatgttaaagatatttattttctctggacacaattctttggctgctgtaatcaaacacaatttaattaactcaccattggcaaatactttccttgcttgcttaacaaatgagccatttggaaatttacttcggttgcagccctatttccatttttaatttttggcaagacattctgctctgaggaggtatatcttgttttacatttgcccattttcctgctcattgctctcatgagttgggagtgaatgctgtgtggcagggcatatcgggatattgtgatgagtgcttagtctagtaatacttcctatattgtattttgctggcacagcttcgtgatgcttttacataataaagtactttgacatctaactagatttaaacaatctacagtccactgtgacttacaagtgtgacatcagagtacttctgtttttttgacgtgatagtcactggtaaaatagttatagtatggcaatactcatgacacttgaaatgctgttgagtaaaccgtgtcattgagatttgtggtgcactgagagtataaagggatgagggcaccaaatatgatctctgtagcaactacccaagtctgctgttgtatcaggaaaacagctatagaccatgtgtaaacaaatgagcatggctgtattctaataagactttattgacactgaaattttcttttcatataatttacacatgtcacaaaatattcttttgatttttttcaacgatttaaaaatgtaaaaatcaggttgggcgcagtggcttatgcctataatcccggcattttgggaggctaatgtgggcagatcacctgaggtcaggagtttgagaccagcctggccaacatggtgaaacctgaaaatacaaaaatagccannnnnnnnnnnnnnnnnnnnnnnnnnnnnnnnnnnnnnnnnnnnnnnnnnnnnnnnnnnnnnnnnnnnnnnnnnnnnnnnnnnnnnnnnnnnnnnnnnnnnnnnnnnnnnnnnnnnnnnnnnnnnnnnnnnnnnnnnnnnnnnnnnnnnnnnnnnnnnnnnnnnnnnnnnnnnnnnnnnnnnnnnnnnnnnnnnnnnnnnnnnnnnnnnnnnnnnnnnnnnnnnnnnnnnnnnnnnnnnnnnnnnnnnnnnnnnnnnnnnnnnnnnnnnnnnnnnnnnnnnnnnnnnnnnnnnnnnnnnnnnnnnnnnnnnnnnnnnnnnnnnnnnnnnnnnnnnnnnnnnnnnnnnnnnnnnnnnnnnnnnnnnnnnnnnnnnnnnnnnnnnnnnnnnnnnnnnnnnnnnnnnnnnnnnnnnnnnnnnnnnnnnnnnnnnnnnnnnnnnnnnnnnnnnnnnnnnnnnnnnnnnnnnnnnnnnnnnnnnnnnnnnnnnnnnnnnnnnnnnnnnnnnnnnnnnnnnnnnnnnnnnnnnnnnnnnnnnnnnnnnnnnnnnnnnnnnnnnnnnnnnnnnnnnnnnnnnnnnnnnnnnnnnnnnnnnnnnnnnnnnnnnnnnnnnnnnnnnnnnnnnnnnnnnnnnnnnnnnnnnnnnnnnnnnnnnnnnnnnnnnnnnnnnnnnnnnnnnnnnnnnnnnnnnnnnnnnnnnnnnnnnnnnnnnnnnnnnnnnnnnnnnnnnnnnnnnnnnnnnnnnnnnnnnnnnnnnnnnnnnnnnnnnnnnnnnnnnnnnnnnnnnnnnnnnnnnnnnnnnnnnnnnnnnnnnnnnnnnnnnnnnnnnnnnnnnnnnnnnnnnnnnnnnnnnnnnnnnnnnnnnnnnnnnnnnnnnnnnnnnnnnnnnnnnnnnnnnnnnnnnnnnnnnnnnnnnnnnnnnnnnnnnnnnnnnnnnnnnnnnnnnnnnnnnnnnnnnnnnnnnnnnnnnnnnnnnnnnnnnnnnnnnnnnnnnnnnnnnnnnnnnnnnnnnnnnnnnnnnnnnnnnnnnnnnnnnnnnnnnnnnnnnnnnnnnnnnnnnnnnnnnnnnnnnnnnnnnnnnnnnnnnnnnnnnnnnnnnnnnnnnnnnnnnnnnnnnnnnnnnnnnnnnnnnnnnnnnnnnnnnnnnnnnnnnnnnnnnnnnnnnnnnnnnnnnnnnnnnnnnnnnnnnnnnnnnnnnnnnnnnnnnnnnnnnnnnnnnnnnnnnnnnnnnnnnnnnnnnnnnnnnnnnnnnnnnnnnnnnnnnnnnnnnnnnnnnnnnnnnnnnnnnnnnnnnnnnnnnnnnnnnnnnnnnnnnnnnnnnnnnnnnnnnnnnnnnnnnnnnnnnnnnnnnnnnnnnnnnnnnnnnnnnnnnnnnnnnnnnnnnnnnnnnnnnnnnnnnnnnnnnnnnnnnnnnnnnnnnnnnnnnnnnnnnnnnnnnnnnnnnnnnnnnnnnnnnnnnnnnnnnnnnnnnnnnnnnnnnnnnnnnnnnnnnnnnnnnnnnnnnnnnnnnnnnnnnnnnnnnnnnnnnnnnnnnnnnnnnnnnnnnnnnnnnnnnnnnnnnnnnnnnnnnnnnnnnnnnnnnnnnnnnnnnnnnnnnnnnnnnnnnnnnnnnnnnnnnnnnnnnnnnnnnnnnnnnnnnnnnnnnnnnnnnnnnnnnnnnnnnnnnnnnnnnnnnnnnnnnnnnnnnnnnnnnnnnnnnnnnnnnnnnnnnnnnnnnnnnnnnnnnnnnnnnnnnnnnnnnnnnnnnnnnnnnnnnnnnnnnnnnnnnnnnnnnnnnnnnnnnnnnnnnnnnnnnnnnnnnnnnnnnnnnnnnnnnnnnnnnnnnnnnnnnnnnnnnnnnnnnnnnnnnnnnnnnnnnnnnnnnnnnnnnnnnnnnnnnnnnnnnnnnnnnnnnnnnnnnnnnnnnnnnnnnnnnnnnnnnnnnnnnnnnnnnnnnnnnnnnnnnnnnnnnnnnnnnnnnnnnnnnnnnnnnnnnnnnnnnnnnnnnnnnnnnnnnnnnnnnnnnnnnnnnnnnnnnnnnnnnnnnnnnnnnnnnnnnnnnnnnnnnnnnnnnnnnnnnnnnnnnnnnnnnnnnnnnnnnnnnnnnnnnnnnnnnnnnnnnnnnnnnnnnnnnnnnnnnnnnnnnnnnnnnnnnnnnnnnnnnnnnnnnnnnnnnnnnnnnnnnnnnnnnnnnnnnnnnnnnnnnnnnnnnnnnnnnnnnnnnnnnnnnnnnnnnnnnnnnnnnnnnnnnnnnnnnnnnnnnnnnnnnnnnnnnnnnnnnnnnnnnnnnnnnnnnnnnnnnnnnnnnnnnnnnnnnnnnnnnnnnnnnnnnnnnnnnnnnnnnnnnnnnnnnnnnnnnnnnnnnnnnnnnnnnnnnnnnnnnnnnnnnnnnnnnnnnnnnnnnnnnnnnnnnnnnnnnnnnnnnnnnnnnnnnnnnnnnnnnnnnnnnnnnnnnnnnnnnnnnnnnnnnnnnnnnnnnnnnnnnnnnnnnnnnnnnnnnnnnnnnnnnnnnnnnnnnnnnnnnnnnnnnnnnnnnnnnnnnnnnnnnnnnnnnnnnnnnnnnnnnnnnatagtcatatattatataaatatataatatatagtcatatattatataaatatataatatatagtcatatattatataaatatataatatatagtcatatattatataaatatataatatatagtcatatattatataaatatataatatatagtcatatattatataaatatataatatatagtcatatattatataaatatataatatatagtcatatattatataaatatataatatatagtcatatattatataaatatataatatatagtcatatattatataaatatataatatatagtcatatattatataaatatataatatatagtcatatattatataaatatataatatatagtcatatattatataaatatataatatatagtcatatattatataaatatataatatatagtcatatattatataaatatataatatatagtcactttactcctaaatatatattatatagcatatataatatgctatattatatatcatatataatatgctatattatatatcatatactatattatatatcatatataatagtatatgtatatttaggaggaaagcgattctggaatagagtgtagaatttgtggattatcagcctgagaagggacaaagggcattagggcatcatttacacattttgagggtgttagaacagaatttggttatcatggattttcagatccactaatgtttactttccatttaaggcacatcaaatcaagagatagtcagtacacataaaagaggagattgactttatgtatttatcaaatatttcacaaatataaaatattgagcatatcatgttttatttatttatttatttatttatttatttatttatttattggtgacagagtctccctctgttgcccaggctgaagtacagtgacatgattgtataatagctcactgcaacttcaaaatcctggatttcaggtgatcctcctgcctcagccttctgagtagctgggactacaggcttattagctgtgttgcctggctaatttgtaaattttttgtagagacagagttttgctttgttgtcaaggctggtcttgaactcagcttctggaaatccttgtaccttagcctcccaaagtgctggaattacaggcatgagccacagttcctggcctgttaccaagtattttttaatgtttactagtttgatgggtaaaaatgatatattattgttttaattagcatattgtactcagaatttagtctgaagatcttttcatatatttattagctgtgagaccttggctatttcagcaagtattttttgagtaatttctctttagcagtatgctggagattgattagggataaggaagaagtgtaaggcctgattcatgcctctcaggaataatctacctggggagatatgttatatgtactacagcaaaataacatttcaaggcagcttttacgtaattgcagctttaggggagtagtggagagttttaaggggtaacagggaggaatgatagaatcagttttgcacatgttaagattgagttcttgactacattgcattgaagataggtcctttgaaaggtttactactaaaagcatcagcaatagcctacttctcatttctagcatagagttacataaggatcattgttaccaacaaacttactgattatattatatatattacccttgagttaaaaaaagtctgaaatattttagagatatcaacagaactggcttcctggccagaggttgggtctagaaggagaaatttgaaagtagtatcatggaagccactagaaaagccaggagatgggatcagttactgacagatttagagaaagaagagctggaagccaagggagtctaatgatgcccagtgagggcaaaggcagtaggactctttggagattatccaatagtgttttctactttactctagttttcattgataagggtcttgagagttccaaataaattgggagccgacgattgtgcgtgtgtgtttggaatccttggcaggaatcattgcagaagagatgccattggggctcagttttctactttgctttttgtgggggagcaggtggatctttctggcaagagtgcctcagtggctactggtcttactatgtctgaacttattcctcctgtatactccaggtgcccagggtgttgccttcactctgttcctagcaggtagcaccctgttgttgcttcctgtgggagtgagggcttaggcaggggtgtctgctcaggtgcactagccaagcttctgttagttgcttgtgggcctttttctggcctttctgcttttgtgccggagttcctgttcacactctttgggatggtgcccttgaaggcccttgagcctgctctgggatgctatttccctttttagcccatctccagctgttttctactttatggggattcttcacagcttctggccgcctgttatttttttagcatggctgtgtaatcactggctatttaaaaaaatatgatttatattatttctagggtttggtgagaaaaaacggggaaggaggcactgtactctttactcaattggctgtctcgattttttttgttaacattctgttcagtgtctctcctgatatgcttgtaggctttattcatactgttttagaaagatttcatagtgttcttggactgagcagttattttgatttattaattttatttttgatacaaagtcttgctctgttgcacagtgcagtggtgtagacgtggctcactgcagcgtcgaactcctgggctcaagcgatccttctgagtagctgggaccacaggcttgtgccaccacgcccagctagtttttaaattttttgtatagatggggtcttgcccaggctggcctcgtactcctgggctcaagcaatcctcctgctctgtctcccaaagtgctgggattacaggtgtacaggtgtttgatttaagacttaattttgtggtctatcctagcctctttgaaaataaagtttatttcctataaaccaatagaaaacagtcataggatatgagcaggtaatggtcttattcacggcaagagagatgcaaaataaaattgtattgaaaaactgctttttaaaaaaaatctaagttggcaaggatcagaaagtttgattaaacaatggtggctgtggagtagagaaataggcgttgctggtgagaatccaagttggtacaacctctgtagaaggcagccaggcagtatctatcaaaattacagatgcatataccctttgacccagcaattctatttctctggatttatcatatctgtctactcatacatgtgtgaaatattttatatgcttatgtaagtgatagtataagatataagtaatgtatatatcttattggagaatgacatttattttttattacttggagaatgatttgtaatagcaaaagatgtagactacctaaagtccatcaatatggtatttgagaaattataaaatggaatgttacacaattgtaaaaaggaatgaagtgcttcatatatggatatataatgacttcctatatattgatgagtgggaatagcagagtagagaggaatatgtcatatgctatggtttgtttaaaaaggggttgaacatatgtttgtatatacacagaatgtctgtggaatgatgcccaagaaactgtgaatgttttctctgagttgagaaggtggttagaagatgggatgggaaggagattttcactgtctatcctttgaagcttttgtattttgtaccatgaatattactgatacaaaaagaacataaaataaacagaaacatctgacaaattttgttagtagactctttgatagtattgtttctcgttgttgcttcacctggtgggaggaggaggttgattccaaaatcaaattttgttcttttgaaaattcagcattcatgtacttaaactcctagagtaaaattgcttgcttttaagttaccacacaaaaaaagtaagatactggtctatttaactgagaacaaattgttatgattttcatttcttttgatctggtgtcatttttttcctgttaattttaatgaagcacagagaaggaaaattgagtacatggtagagccaggaggacccatatttaaattgctgtcagcaaaccaacactctttgaactaacccactttcatccatacagttagaggtacttattcagtacactaatattagacctacaatcctaactgctaattagcatgagtcccctgataaatagcacactgtaaacaagtagtcaaggtcttttttactcgtttgtttaaacatatggtttattgaggcatattcagggtcacagggattattggacaaataaaaataatttgaaagctttggctaaaaaggaactagcaatatccttaaggaggtggtggaagacaaaatctgttgtatactcctcagagttaatgaaattaatgcagaatcccagaggacccaagaacattacttattttgcttttattgaaaaagttcaattttgaataaaatctgaaagaaataatttattgggtagctgggagaggtggctcatacctctaattccagtgctttgggaagcctaggcaagagggtctcttgaggccaggagattgagattagcctcagcaacatagcaagacgcccatctctataaaaaatttaaaaaagttagcagggtgtgatggcatgtatctgtaatcccacctactcagaaggctaaggcggaaggattgcttgaattcaggagtttgaagctacagtgaattatgttcatgccactgcactctagtgtgggtgacagagtgagaccctatctctaaaataagtaaataaatttattttggaaaactagtctaagtgaaagaacattctgtaataggacaccgagtaactagaatatgagatcctaatatctcatcatgtttaatatggacgatgaagtaacaatatgtaaaaacaatcctagtggttgtgaaagaaagtacctattagtctgatttgttggcacctctctgggacatgtagattcttttttgtttgtttgtttttgttttttttgagatggagtgttgttcttgttgcccaggctggagtgcaatggcacgatctcggttcactgcaacctccacctccagggttcaagcgattttcctgcgtcaatctcctgagtagctgggattacagacgcctgacacttcacctggctaattttttgtatttttagtagagatggggtttcactatgttggccaggctggtctctaactcctgacctcaggtgatccacccacctcagcctcccaaagtggtgggattacaggcatgagccactgtgcccggccttgtggttttaattgagcattttatgagattagatttctcttttcttagcatttcaattatactttttttttttttttttttactgttttagtgtttaccctagagtttgtaatctacatttacaagcaatccaagattgcttttaaataatacaataacaacatcaccacttcacagtttgcacaataccttataataacaaagcattcctaattctttctgcctgtctgttgcattttcagttcacatatacattgctgtccttcatttcacttcttttttttttttttttttttgagatggagtcatggtctgttccccagactgaagtgcagtggcatgatcttggctcactgaaacctctgcctcctgggttcaagtgattctcgtgccttagtctccctagaagctgggattataggcgcacaccaccatgctgtgctaatttttgtatttttagtagagatgaggttttaccacgttggccagcctggtcttgaactcctgacctcaagtgatccgcctgccttggcttcctaaagtgctgggattataggcatgagctaccacacctggcccaaaagtttttaatttgatgaagctcagtttataaatttttttcttttatgggttgtgctttttttgttgttgttgttgaaatctccatgcaccaccacacctggctaattaaaaaattttttttagagacagggtattgctatattgcccaggctggtatctaacccctgtcctcaagtgatcctcctgcctcagcctcccgagttgctgtgattacaggcgtgatccactgtgcctggccagaaaatattttatttttaatcaaagtagtatatggatgtgattttgaaaagtcaactaatatgacaaacttaatataaaaaactgctctaccaccctccccactccagagtccttttccacaggggtggccactttctttttcttttttgttttgtttttttgagatggagtttagctcttattgcccaggctggaatgcaatggtgcagtcttggctcactgcaacctccgcctcccaggttcaagtgattctcctgtctcagcctcccaagtagctgggattacaggtacctgccaccatgcccagctaatttttgtatttttttttttttttgagatggagtcttgctctgttgcccaggctggagtgtagtggcaagatctcagctcactgcaacctccacctcccaggttcaagtgattcccctgcctcagtctccctagtagctgggactacaggcgtgtgccaccacacctggctaatttttttttgtattttagtagagacggggtttcaccatgttggccaggatggtctcgatctcctgacctcacggtctgcccgtcttggcctcccaaagtgttgggattataggcgtgagccaccgcgcccagcctaatttttgtatttttaatagagacagggtttcatcctattggtcaggctggtctcaaactcctgtcctcaggtgacccatccgccttggcctctcagggtgctggaattacaggtgtgagcgaccgcgcctggccaccatttaaaaatctataagctgttgctttttgctatttacctccttatttatttaatttgagacagagtttcactctgtcgcccaggctggattgcagtggcacaatctcggctcactgcaatctccacttcccaggttcaggtgattctcgtgccttagcctcctgaggagctgggattatgggcatgctccaacatgcctagctaatttttgtatttttagtagagacgggttttcactatgttgaccaggttagtctcgaacttctggccttaagtgatccacctgcctcggcctcccaaaatgttgggataataccacacctggccctacttccttatttataactaataaatttttactgttttttgatttactaactttacatattttctattgagcactacctattatggaagatgaaggtttagcactcgtagaccaccaatcctgctgctgcttctggaatcttctcagtagagttaactcacaatttttggttaaatatttagtatttatatcatagtgattatataaatgttgattactgttgaatttagtcgtatactatgattacatgacctttcttgaataacttgtttttcccaaagtttgtagtctatacgaaattatttactttattctccatataactattattcattgcttccaaattctcctacagtattgtaacattccacagaataaggttagacgcatcaagtgaaccgtcagttctatgctttcttctcctggttgatccgggagctgttttgactcttgtcccagcctgctccatggctgtgattctctataccactgccctgtgttggatcccctgtttcttgaatttcttcctttttcttggcttgttccctcatgtggaaggagtacatcttgtagcttccttgtaggttcctgggaggtcttttgaatcttggcaaatcagaaaatgtttttattctactttcaaacttaattggtagcttgaaaagctatagatttctagttaaattaattcctcttggccaggctcagtagctcatgcttgtaatgtcagcactgtggttgaagccaaggcagaaagagttcgagaccagcctgggcaacacagtgagaccccatctttaccaaataacagaatattagctgggctttggtggcatgtacctgtagttccagctacttaggaggctgaggcaatgaggctcccttgagcccaggagtttgaggttacaatgagctataatcacgccactgtactccagcattgtactcagcaacagagtgaggccctgtttcttaaaaaaaaaaaaaaaaaaaaaaattttaatgctggtactagctatgaataaatccataatattttttgccagttttaaaatcttataaatgaaagcataccatatctattaggtagcttgcttttttttttaaacattttatatttttgagatgtatccatttagctctgtttcattcattttcactagtgtattatgtccccatataattttgatagcttaaaatactattgtaagttaggaatttatatatttcagagaatttctttctttctttttttttttttttttttgagacagtcttgctcttgtcgcccaggctggagtgcaatggtgtgatcttggctcactgcaacctctgcctcctgggttcaagtgattctcctgtctcagcctccctagtagctgggattacaggcatgcaccaccatgccagactaattttgtattttgagtagatcgcctcaggtgatctgcccgccttggcctcccaaagtgctgggattacaggcgtgagccacagcgcccggccttcaggatatttcttttatagcattttctaattgggcttaacaagccctactttaagaaattaaaccttatgattagctgtcttaatatagaggcttaattgaagctgaattatgattcagttgaagttgaattgagttattggggcccctgtccccttgcaggaaggatgaaagtagtggctagcctcagctttaggggcaggcgatgaggagccagatcagtatttctatctcagattcagaagacccagctgtccatgtgcatcatcggggaagcatcttgctctcagaataagcagctcaatccagctcccaaattctgaccgtggcttcagtgcctttgtggaatgagaagggacatgaggaagaaagtgagtcactaatacacattctcacctgacctgagccgcctttggtccctgaggccatgtagtttcctttcattgtgatggtaattttaaaatagtataatgtattatttatcttatcaccattttattattcaatgggagaacttttctgaacaaatcaagataaaacatgatctaaatctatgttaagtgtgatttaagggagacagtgattcatatttgtaactagttttcttcccttagtgactgagaacaaccaatactgacttttgaagagcctcgtggatactaattatttattcactcccttgttccttcaacatactgtttagggaattttttacatgctagtctagacagtgggcatagacagatgaatgagataattcctgtcgtaaaaatgtgcatggtttaggggaagaggcatatcaactaaaactgcatatgtgccctacagcagaatgacagaaacattaaatgtgattcctttgtaattgggatctctttcacttgaagttggtaattcaggtttgtccctatgacccccataagtagaagtagcacatggtaattacttgagctatgttcccttccttgtacattcaagccatccagatttctgtatttctttgtcaccattgttttggttgtaaaacagcttcattttcagactaattataagttaccattattatgattttgctttgagacattttcttgggtagagctatgcccatcctaagatacatggtacaagtacaatatagatttggatttttgtgtttgtattggctaagacaggtgttagctccatatttctttttttttttttttgagatggagtcttgctctgtcgccaggctggagtgcagtggcgcgatcttggcccactgcaacttctgcctcctgggttcatgtgattctcttgcctcagcctcttgagtagctgggactacgggtgcgtgccaccacgcccagctaagttttgtatttttagtagagacggggtttcaccgtgttggccaggatggtctcaatctcttgacctcatgatctgcctgcctcagcctcccaaagtgttgggattacaggcgtgagtcaccatgcctggcctagccccatatttcttgtaactttgtatctgatgtctaatatatttataaatacagaaatgtgtgattttctttagtaagtttatagtttttttataggtagacaaagcatgatgacttttgaacaagtttaaagtttttatttttattttttataggttgtcttttggaaatgcaggtttaaggacaaattatctgcttaagctagaagatgggatcgaatagcagcagaatcggcgatcttcctaaaaatgagtacttgaaaaagttatcaggcacggaatctatctctgagaatgacccgttctggaatcagcttctctcattttctttccctgcaccaactagcaggtaagagattgcctggagattgaaaatttgaatagagggccatatcaacttgtgtggtatgctgattaaaaaaaaatttagaaatgttctgtctatctatctagtctatctgtcatacatagatcagtagaaaatccaaaagatttgaaagtagaaaataagcttttctttttacccaactcagtagccacctcccttctctagaggttatcactggtagcagtttattttgaatcgttctagagataatataggttacttaagcatatatcccatatagtttcacaaaattgtttaaatacaaatggtagcatactacacgtactgttctgtcccttgcctttttttccacagttaagtaaaatatatcttgtatatgtagcacatttgcaacttccttattctttttaatggctgtggagtatctgtagaatatatttaattggtttttctgttgatgaacatttagattgtttccagtctttgttgtaacagttactgccgcatacatcatttttcatacacacaatatatctttagtataaattccttgaagtagaattgctgggtcaaagtgtatgtgcatttgcaatttggtagctatgccaaattgtgcaccatggaagttgtagcaatttgcatacctaccagcaatgcatgagaggtgtgtttccccatatctttgtcagtttgatgcattttagacctttgacctctgccagtttcagaggtgaaaaataatatctcatatttaattctattacaaaaactgtcagacaataataatgaagaatgaatagaatattgaattcccatacactcaataactagatttaaaaattttttatttactttttaagagctttattatgataggcagaatagtagccccccaaagatgtccatgtccttgtctgcagaatctgaatatgttacattacatggcaaaggggaattaaagtagcaaaaggcattaaggttactaatcagctgaccttaaaacagggagattatcttggattatctgggcaggcccaaagtaatcacaaggcttcttgaaagtggaagagggaggtagaagagaaagtcagatgtgatgtgaggaggactcagcctgcccttgctggctttgaagatggtagggaggtcatgagcaagaaatatgagcagcttctagaagctggcagaggcaaggatgcagatttccctctagagcctttggaaagggatgcagccttattgacatcctgatcttagctcattgagtgtcagacttctgacctacagaactgtaagataataaatttatgttgttcacaccactaaattttgataacttttgtagtagcaatagaaaaataatacactttttgagatatgtttcatatatcatgtaattcacccatttaaagtgtattattcagtgtttttattcacagaattgtgtaacaatcaccaattttagaacattatcatcccagaaaggaaccatcccatgccctatcccatgcccattagcagacactcccccaaactctagattgcactagcaaccacttatttatttatttattttttgagagggagtctcagtctgctagagttcagtggcgcgatctctgctcactgcaaactctgcctcctggattcaagcaattcttcggcctcagcctcccgagtaactgggcttaacggttgcatgccttcatgcatggctaatttttgtattttttgtggagatgagatgtcaccatgttggccaggctggtctcgaacccctgacctcaagtgattcaccttcctcagcctcccaaagtgctgggattacaggcgtgagacactgcgtccagccactaatttaataactactactaactttgcctcttctagacgtttcatgtaaatgaaattgtaacaataggtggtcttttgtgactggcttctttctttttttttcttctacctttttagagatggggtcttgctctgttacccaggctggtcttgaactcctgggctcaagaaatcctcagcaccccaaagtgctgggattacaagtgtgagccactgcgccccgccgtgactggcttctttcactgaatgtaatattcatacatgttgtagcatgcaccaatacttgcattcctttttttcttttttttttgagacaaggtctcactctgttgcccaggctggattgcagtggtgcgatcgtagctcactatagccttgaactcctgggctcaagtgatccttccacttcaccttcctgagtagctgggaccacaggcatgcaccgccatgcctggctgctttttaaaaaatcttttgtagacataaggtcttgccatgttgcccaggctggtcttgaacgaacacctggcctcaagtgatcctcctgcctctgcctctgaaactgttgggatttataagcatgagccactggacccagcctccattcctttttattgctgagtgatactccattgtatggatatactgcattttgtttgtccattcagaaattaatagacatttggatattgttgagtgatactccattgtatggatatagtacattttgttcattcagaaattaatagacactgggttgtttctatattttgttcattattgttttttaagtatcgtaaagtctttttttttacataaccataataccattatcacacctcacaaaattaacaataatttctgctacccagttcatatttaaatttttccatatttaaattttaattaaatttaaattaaagttgttttaatagtttattacaattaggagccaaataaggtgcatacgttgcacttgatggttcttgtccttaaatgtcttctaatgtagaatataggtgtccacttcccacccttgccactattttttcccttcatgtcatttttaaaacaaattgtgtcagtttttctgtagaatgttccatcttctgtatttatctgattgcttctcacaccttgtaacttgttcttttattccatatatttcccgtaaattggaaatgaggtttaaaagcttgataaaatttaggttaatcatttttggtaaggtattccatatgtagaaaaagtatgttttataccagttatcatgctaagattgatcagagttttgagtgtattttagcatgtattgatttttgcctgaatcacctgttttataagaggttacaaaatggtaatatttctaatttggtcatttctacatttaataactggagttcttctgtaaagaggactttatgtcatcaattaggttatgtaaaatatagttcttactatatttattactaattaaaggtaagcacttcagtttttttctttaccaattttcaggaaggggttggtgtaatcatgacaaagaagtctatacttcccgtttccctttacctcagaggtagagggcctatttctgtcttgagggtaaattcacacacacacacacacacacacacatgttttccagtgtgactaatagcagtcgtttttctttttgatacccagttcagcaagttttggatagtggtccttatggttttatttgcctttctttaataattaaggttgtgtttattttcatatgtttaaggggtattggtatttccttttccgtgaactgtttatatcttttggcaataaattttaatttttttattattattttttattatactttaagttctagggtacacgtgcacaacatgcaggtttgttacatatgtatacgtgtgccatgttgatgtgctgcacccattaactcgtcatttacattaggtatatctcctaatgctatccctcccccctccccccaccccacaacaggccccagtgtgtgatgttccccaccctgtgtccaagtgttttcattgttcaattcccacctatgagtgagagcatgtggtgtttggttttctgtccttgcgatggtttgctcaaaatgttggtttccagcttcatccatgttcctacagaggacgtgaactcatcctcttttatggctacatagtattccctgctgtatatgtgccacattttcttaatccagtctatcatcgatggacatttaggttggttccaagtctttgctattgtgaatagtgccacaataaacatatgtgtgcatgtgtcttgatagcagcatgctttacaatcctgtgggtatatacccagtaatgggatttctgggtcaaatggtatttctagttctagatccctgaggaatcgccacactgacttccacaatggttgaactagtttacagtcccaccaacagtgtaaaagtgttcctatttctccacatcctctccagcacctgttgtttcctgactttttaatgatcgccattctaactggtgtgagatggtatttcattgtggttttgatttgcatttctctgatggccagtgatgatgagcattttttcatgtgtcttttggctgcataaatgtcttcttttgagaagtatctgttcataccctttgcctactttttgatgggggttgtttgattttttcttgtaaatttgtttaagttctttgtagattgtggatattagccctttgtcagatgggtagattgcaaaaattttctcccattctgtaggttgcctgttcactctgatggtagtttcttttgctgtgcagaagctctttagttgaattagatcccatttgtcaattttggcttttgttgccattgcttttggtgttttagacatgaagtccttgcccatgcctgtgtcctgaatggtattgcctaggttttcttctagggtttttatcgttttaggtctaacatgtcagtctttaatccatcttgaattaatttttgtatgaggtgtgaggaagggatccagtttcagctttctacatatggctagccagttttcccagcaccatttattaaatagggaatcctttccccattgcttgtttttgtcaggtttgtcaaagatcagatggttgcagatgtgtggtattatttctgagggctctgttctgttccattgatctatatctctgttttggtaccagtaccatgctgttttggttactgtagccttgtagtatagtttgaagtcaggtagtgtgatgcctgcagctttgttcttttgccttaggattgacttggcaatgcgggctcttttttgattctacatgaactttaaagtagttttttccaattctgtaaagaaagtcatcggtagcttgatggggatggcattgaatctacaaattaccttgggcagtatggccattttcacgatattgattcttcctatccatgagcatggaatgttcttccatttgtttgtgtcctcttttatttcgttgagcagtggtttgtaattctccttgaagaggtctttcacatcccttgtaagttggattcctaggtattttattctctttgaagcaattgtgaatgggagttcactcatgatttggctctctgtttgtctgttattggtgtataagaatgcttgtgatttttatacattgattttgtatcctgagactttgctgaagttgcttatcagcttaaggagattttggactgagttgatggagttttctaaatatacaatcacatcatctgcagagataatttgacttcctcttttcctaattgaatatcctttatttctttcttctgcttgattgccctggccagaacttccaacactatgttgaacaggagtggtgagagaaggcatccctgtcctgtgccagttttcaaagggaatgcttccagtttttgccagtcagtacaatattggtggagggtttgtcataaatagctcttactattttgagatatgtcccatcaacaccgaatttattgagagtttttagcatgaagggctgttgaattttgtcaaaggccttttctgcatctattgagataattatgtggtttttgtccttggttctgtgtatatgatggattacggttattgatttgcatatgttgaaccagccttgcatcccagggatgaagcccacttgatcatggtggataagctttttgatgtgctgctggattcagtttgccagtattttattgaggatttttgcatcgatgttcatcagggatattggtctaaaattgtcgtttttggttgtgtctctgccaggctttggtatcaggatgaagctggcctcataaaatgagttagggaggattccctctttttctattgattggaatagtttcagaaggaatggtaccagctcctctttgtacctctggtagaattcggctgtgaatccatctggtcctggactttttttggtttataggctattaattattgcctcaatttcagagcctgttattggtatattcagggattcaacttcttcctggtttagtcttgggagggtgtatgtgtccaggaatttatccatttcttctagattttctagtttatttgcatagaggtgtttatagtattctctgatggtagtttgtatttctgtgggatcagtagtgatatcccctttatcattttttattgcgtctatttgattcttctctcttttcttctttattagtcttgctagtggtctatcaattttgttgatcttttcaaaaaaaccagctcctggattcactgatttttttgaagggttttttgtgtctctatctccttcagttctgctccgatcttagttatttcttgccttctgccagcttttgaaagtgtttgctcttgcttctctagttcttttaattgtgacattaggttgtcaattttagatctttcctgctttctcttatgggcatttagtgctataaatttccctctacacactgctttaaatgtgtcccagagattctggtatgttgtgtctttgttctcgttggtttcaaagaacatctttatttctgccttccttttgttatgtacccagtagtcattcaggagcaggttgttcagtttccatgtagttgagcggttttgagtgagtttcttaatcctgagttctagtttggttgcactgtggtctgagagacagtttgttataatttctgttcttttacatttgctgaggagtgctttacttccaactatgtgatcaattttggaataagtgctatgtggtgctgaaaagaatgtatattctgttgatttggggtggagagttctgtagatgtctattaggtccacttggtgcagagctgagttcaattcctggatatccttgttaactttctgtcttgatctgtctaatgttgacagtggggtgtgaaagtctcccattattattgtgtgggagtctaagtctctttgtaggtctctaaggacttgctttatgaatctgggtgctcctgtattgggtgcatatatatttaggatagttagcttttcttgttgaattgatccctttaccattatgtaatggccttctttgtctcttttgatctttgttagtttaaagtctgttttatcagagactaggattgcaacccctgcttttttttgttttccgtttgcttgttatatcttcctccatccctttattttgagcctatttgtgtctctgcacgtgagatgggtttcctgaatacagcacactgatgggtcttgactgtttatccaatttgccagtctgtgtcttttaattggagcatttagcccatttacatttaaggttaatattgttatgtgtgaatttgatcctgtcattatgatgttagctggttattttgccctttagttgatgcagtttcttcctagcctcgatggtctttacaatttggcatgtttttgtattttatttctccttcacttatgaagcttagtttgtctggatatgaaattctgggttgaaaattattttctttaagaatgttgactattgtcccccactctcttctggcttgtagagtttctgccgagagatccgctgttagtctgatgggcttccctttgtgggtaacccaacctttctctctggctgcccttaacattttttccttcatttcaacttggttgaatctgacaattatgtgtcttggagttgcttttcttgaggagtatctttgtggtgttctctgtatttcctgaatttgaatgttggcctgccttactaggttggggaagttctcctggataatatcctgcagagtgttttccaacttggttccattctccccgtcactttcaggtacaccaatcagacatagatttggtcttttcacatagccccatatttcttggaggctttgttcatttctttttattctttcttctctaaacttctcttcttgcttcatttcattcatttgatcttcaatcactgataccctttctttcagttgattgaatcggctactgaagcttgtgcatgtgtcccgtagttcttgtgccatggttttcagctccataaggtcatttaagggcttctctatgcggtttattctagttagccattcatctaatctttcttcaaggtttttagcttcttcgcgatggtttcgaacatcctcctttagctcggagaagtttgttattaccgatcttctgaagccttcttctctccactcgtcaaagtcattctccgtccagctttgttctgttgctggcgaggagctgcgttcctttggaggagaagaggcactctgatttttagaattttcagcttttctgctctggtttcttcccatctttgtggttttatctatctttggtctttgatgatagtgacgtacagatggggtttggtgtggatgtcctttctgtttgttagttttccttctaacagtcaggaccctcagctgcaggtctgttggagtttgctggaggtccactccagacgctgtttgcctgggtatcaccagtggaggctgcagaaccgtaaatattgcagaacagcaaatgttgctgcctgattgttcctctggaagcttcgtctcagaggggcacctggccgtatgaggtgtcagtcggcccctactgggaggtgcctcccagttaggctactcaggggtcagggacccacttgaggaggcagtctgtccattctcagatctctaactccgtgctgggagaaccactactctcttcaaagctgtcagacatggacatttaagtctgcagaactttctgctgccttttgttcagctgtgccctgcccccattggtggagtctacagaggcaggcagttctccttgagctgcggtttgggcttcccggctgctttgtttaggtactcaagcctcagcaatggcaggtgcccctcccccagcctcgctgccaccttgtagtttgatctcagactgctgtgctagcagtgagcaaggctccgtgggtgtgggaccctccgagccaggcgtgggatataatctcctgatgtgccgtttgctaagattgttggaaaagggcagtattagggtgggagtgacctgattttccaggtgctgtctgtcacggcttcccttggctaggaaagggaattccttgcacttccctggtgaggtgatgccttgccctgcttcggttcacggtccacaggctgcacccactgtcctgcacccactgtctgacaagccccagtgagatgaaccaggtacctcagttggaaatgcagaaatcacccgtcttctgtgttgctcatgctgggagctgtagactggagttgtttctattcagccatcttggaacctccccccaaattttaatttttaactttattgtatacaattggattgggccttagaagtttaccttagtttaagccaggtgtggtggctcttgcctgtaatccaaacaccttgggagaccgaggcaggtggatcacctgaattcagcagttcaagaccagcctggtcaacgtggtgaaaccctatctctactaaaaatacaaaaaattagccaggcgtggtggcgggcgcctgtaatcccagctactcgggaggctgaagcaggagagtcacttgaacccgcgcggcagagcttgtggggagctgagatcgcgccattgcactccagcctgggcgacaagagcaagactccatctcaaaaaaaaaaaaaaaaaacgaattttaacttagtttataattaatctgatggcttggattagatgtattttatattgaagtggttacttattcttgcttctgagatccttggaaaattaaaggtggctgtggattggtgagaaaggtcatactggggatgagctatagcatcaacaacttttgaaatcatttccttaatccttgcagaattatcactgagtactgctgctcatgtgatagtgatacgacttagaggaaaagagggcgaaatggagagcatgatttattgtccaaaataatttttcttttcacttatgtaaattctaaagtaatttataaagctattccaaattatagtatatggtttttacattgaaatatactaaagtagacttaactaaatagagatatgtaccatgtttaaggaataaggagactattgtaaaaatgtcacttcttttcaaattgacctatagattgaagacaatttgaattaaaattctgaaagccttgttttggaagattgggggatcttgataagtttattctgaaatgtgtatgaaaaagtataatgaacaagaataactaaaatacttaagaataagaataaatgtatgtgtatgtacttgatttatgtggagctggcatttcagtggggaaaaagatgaacttcttaaaaaatagtgacgggaataatttgttagccatttttgtcgacctgtgccagtgcctcacagtttaagttattatggctttatagtttgttttgttaattattatttttactcaaattttattttattttattttatttttttaatttttgagacagagtcttgctctgtcgcccaggctggagtgcagtggtgcaatctcagctcactgcgacctccgcctcccaggttcaagcaattccctgcctcaggcttccgagtagctgggattacaggtgcctgccatcacgcctggctaatttttgtagtttagtagaggtggagtttcatcatcttggccaggctggtcttgaactcctgacctcctgatccacctgccttgacctcccaaagtgctggtattacaggcgtgagccactgcgcctggccaccattctcttttcttaaatcacccaggtgatttaagagaaacgtataaagggatcttagaaagtgaaaaaactgtaaagtaaataaactgcattgtaaatctgtgagagtatatttataaaggtttcttcccacccccaccgccacaagtgagtttacatgatagaggtttcatttgtggtgttgcatatacttttggtctgtcactttctctttggcactgccctgctcctcactgatggtatttgatatttgaccttgggactgagtaggctttgaggtagcaggtgcccccttgttgacagagtcaggggccaaaattacctagttcatgaattattcagggctaagatgaatctcagtagaggagactctgaatctagataattctgagattgttcactcttggaattcgttagatacatatgtgccgtcttcaagtaaagtccatttttgtagccaaaaatcgatgtttgctgcaatttttagaaatactaataaggcctttaggacgaatctaatccttccttactattaactgtttttagcatcagagtaatcagattttgtaagagtttccaggtgtggttctaaaatctttcttaaattatttaatagtttttattttttcaccctgttaaaattagttgtgcagcaaagatctgaaacaaaatgaagaataattaaagactaaaggttaataatatacactgtttttttcctaaatattttaaactacttatatgactgattttatacatgtttctaaactacataatagcaacaaaaatgaaaaacagacctgtacttattattttttggttcataggcatctgaggctatggtgtgtgtgaacataatcgtgtgtcatgcttatcattgagaactgctggaccagcatgacttatctctgagtatcaaactgttattcatttatttgtttctcaggctataatagttagctggatatatgatgtctcttgttcttaaaggcttataatcttttttttttttttttttttcagacagagtttcactcttgttgcccaggctggagtgcaatggcatgatctcggctcaccacaacctctgcctcccgggattaagtgattctcctgcctcagcctccccagtagctgggattacaggcatgtgccaccatgcccggttaattttgtatttttggtagagatggggtttctccatgttggtcaggctggtcttgaactctcgacctcaggtgattcgcttgcctcggcctcccaaagtgctgagattacacgcccagccagagcttataatcttatctgtaaatcagcaaacaagtatggtgaaatatgataaagggtgttatagaagaattgcattttatgcatatgcaaacaaatatgcacatatatcccttctctttttttgataaataatagcatgtatattatacacactttttcactttgtgctttttttcatcagttatatcttgaagagccttctatatattaacttcctcactctttttaatgggggggcatatataccaaaattaattggatttaccatttgggttttaccatttggattgcttccagtgttttgttattacatataatgtagcagtgaatagccttatacaagctgggaacggtggttcatccctgtattcccagcattttgagaggctgaggcaggaggatcttttgagactaagagtttgagaccagcctgggcaacatggcgagacccccatctctacaaaaaataaaaaaattagctgagctcggtggcttatgcttgtagtcccaactacttgggaggctgagtcaggaggattccttgagcccaggagttcaaggttgtagtgactatggtcaggccaatgctttcgccagcctgggcaacagaacaagaccctgtctcaaacaacaccaccaccaacaccaccgctaccaccttatacatatgggtagaagtgacttcttgtactataaaggaaacgtggccagatgacttctagtaatgcttccagtttgtgttgagaggaatgggaatcaagtgtaataggttgggaatgtagaaattgcttcccaacatagttcatgatgcttcagggtaaattgataaggctgcttgggtctagagtggtctggggctctgaagggtgtaggggctctaactatgaaaggctgaactgggaaataaaaatatgtccacctgttacctatttttggcacacttgttagaaagctgaggattagaagtagggtcccttgtaggctcttgttgagtggatttggagaaaacattgtttcagagacattatttttttaagtagggtgagtaggtggaaagtgcaggaagaaaaactagggcaggaaaacaaaatctgagacatctgcagcaatatacctgtgatgtgctgaaggtctgaatttctattactgtgtaggaaatggaaagtcctacatctcagtaagtgtgtgtaaccagctaacagcagtatagagaataatatctttaaaaagttcttttgttttaaattaacacctgatttgagtgttaatacttaatgagcttagagttccagatttgagagcagctctgagcagtatagcagcagcctgaatactcttctccagaggaattgttttgctaaaaggtgcagtgactttgggtgaagtgtgaagaatggagaccatgtagcatggcagggggaacatggattttggagccaaactgaccttgcctgagctccacaactgactagtttgtgaattcaggaaagctgcttaatctcactgaacctgttgttgcttttgtaaaatggaaataataacccctaccatgtagattcatagggatgatgaaacactatcatgcatgtaaagtgtctgactttgctcttctttcaaggagtaattacctattagtttacaaagacctaggactctgtcttgagagttagtctaaaatatttgaggaatgaaaataagcagcagaaatttaaccaattttctgatgaccgctttatcttgatgattgaaagtcctgtgcctcttttgaactaattgttctgctgttttaaaaattaagccagacagtgattatagtaatagtcatctttgtgtataagcaatctaccttttttttttttttttgagtcagagtttcgctcttgttgcccaggctggagtacagtggcacgaccttggctcactgcagcctctgcctcccaggttcaagtgattctcctgcctcaccctcccaagtagctgggattacaggcacatgccaccatgcctggctagttttatatttttagtagagacagggtttcaccatgttggtcaggctggtctcgaactcctggcctcaagcaatccacccacatcagcctccaaaagtgctgggattacaggcatgagccaccatgcccagccacaccctactttttataaaggctacttttcagaaaactttactgtgttacagaaattgtattatgtgtactgagcactagatggtgctcatataaggcaaaaagggcagctcttggcacagtcacttaaaactaatttttctaagtaccaaagtaatgcatgttcatttttaatactttaaatacagaaaagcaccaggaaggcaaaaaaaaaaaaagataaaaataataacaaccaagagtaacttgttaacattatggtgtatatcgttttaattctctctcatttttaaaatttttttaattttttttttttttttttttttgagagacccagtctcactctgtctcccaaactgtagtgcagtggtgtgatctcagcttactgcaacctccacctcctgggttcaagcaattcttctgcctcaggctcctgagtagctgggactacaggtgtgtgccatgctcggctaatttttgtatttttggtagagacagggttttgccatgttggcctggctggtctcaaactcctgacctcaggttgaagcaggagaatcgcttgagccctggaaacagaggtttcagtgagctgaggtcatgccactgtactccagcctgggagacagaaagaaactccacatcaaaaaaaaaggaagtatttttttgattaatatacctaaaaaaatagttatggaatgtcttctagttgctagggactgtttttaaggactaaaaacatgagtgacaaagtccctgctctcatgcagtttatatgttactagaggagatgagcgataaacaagtgaacaaataaatatgttaagtcatttctggaagtgtcaagtgtaaggaagaaaagcgaagcggagtgaggtgatggagagcaatagctttaggagatttctttagccagagagtctctgggaaagcagcatttgagcagagacattatgatgccagggagtgagccatgcatgttttgtggagagtattccaggtagaggggcagcgagtgtaaagaggctgaagtggaagtaagttctgcttgttagaagagcagcaaaaggcccgtgtagcagaacagccaacacgaaacaaataacataaggacttggctgtgtgaaagatcttataagttgtatggtattccagagatgagcctgtttcattatcactatttgggaattgagtctagtctgctataatttactaactatcctataatatggaaagattttattcatgttttttttattgtggtaaaataaacataaaatttaccttttcaaccattttttaaattattgttttttcgtctggtcctcttgactcttgtaaccttttcaaccatttttaattgtacagtttaaagtacattcacagggttgtgcaaccatccccaccatccctttccagaatattttcatcacctcagatagaaatgctatacctattaaacaataacttcccatcctctccctccagtttctggtcacctctatttttactttctgtctctatgaatttgactactctgggtatgtcatataagtggaatcatacaatatttgtctttttgtgactggcttatttcatgtagcataatgctttctttctttctttctttcttttttgagacagagtctctctctgttgtccaggctggagtgcagtggcgtgattttggctcaatgtaacctccgcctcctgggttcaagttgtcctcccgcctcagcctcccaagtagttgggattacaagtgtgcaccaccatgcccgctaatttttgtattttttagtggagacggggtttcaccatgttggccaggctagtcttgaactcctgacctcaagtgatctgcctgccttggcctcccaaagtgctgggattataggcttgagccactgtgcctggcctagtataatgccttcaaagttcataatccatgatgtaatttccttccttaagtctgactaattacccattgtagttatataccacatcatataatgttttctaaacttcagtttgctgtactcttatccttttaaagggcttccatttctctttagcattgttagtttccacttgtcactttgacttttctttcagggatttttcttacatgataaaaaatttaattctactgagataaatgataaaatagaatgataaaatgatataatgataatataattctgctaaaaggattcgctaacgtaagcatcattgttactttaccagttatttattgagctcactgtttgtcagatgctggacccattgctgtagacacctccatttttttagttctgttattgttattcaagtctattattcccacgtgtgagagaactgaggcctaggaaggttgtctaaagccacacagtgagtagcgagtaaggaccagatttaatttaaaccaggtttatttgtctaagtccagagaggaattccgttgaccatcatgccacactgtctccttgggaagcacaggctaatctgagacccagtttcatgtaagtactaaagagctgcagcattaaatcgtatggtaatctttgagagtagaaccaccagattatatgttcacattttcaagcatttttcaaagctgcagatcataatcagaggaatcttgagtgccatcatttacagtgatcacacaagctgatgggtaatctgtttagtattttcaccttgccttgagtagagtgtatcttctctctttttaagcagagctgcctgaatgatcctttgtcaaagtttcttagtctgtttcctcagttgacacacaggaagagagacttttgtttaattaggtcacgtttttaactgacagaagcaagtgattgtaaaattactttcttctttgaatctttgatgcctgtctctgtttctatatttttaggctctttggcacactttatgttcaattttattagaacttttcaagttgaaaaatctgctctgttgtagaggtgggcctgggatcgctgctaaaccatcttctaaattctgttttaactttttctttgtaggtttgcttggttggtgaccaaaataatgtactaggctgttttactcagggaataaataatttgagacttttcttggcatcttattatatttttcaaattgagggaccacaagaagttcagtttttacatcttgagtcaaaacctttatttcccattctttcatttatacctttctatgcaaaaatcattttagaagatgcttaagttttcccaggattaatcagtcccttaaactaaaagcttaaatgggggaaatatatcctttaaagcattaaagtaaagggacatgtaagttttactgcaggtgcacccttgattcctcttctttctcactgtgttggttggaattttttttttttttttttttttaagtcaatgtttttctctttcttgggaaaataaacaccgtattatctagcatagtagttgctgacattttgacattttaatagttatatttcctttcattttggcagttgaatgacagcatatacgattgtctgtgaatcacatgaatgtaaacacctttttggttctgcatgggtgcgttaaaaattgctataatttatatgcagtttttgtcctttgactttttcctattaataggtcctcttaaaacattaaccttcccacagtttaaccactgaattggctgattcttgttagttttgtgaatgatttctgtaattctctttgctaaggtaagggggaaaatgtcttcagaagtgcttctgtcctttcctgaatcgttacttgttgattttttcaggttatatctttgactaacattatatatttatcagaatttgtatgttgttggctgaaattgacatcattaatataaaatgtcagttttgaaagaattttatggcggaactttcagctgaagggactaaggattttcagtgtttatgttatgaaacttacagtttgattgttcagcaaacctgtgttcagaggtctgttataacttctcccccaacaatttttttgcctatctgcttttcttaaaaatatttgagctattaatttctcacttttcattattgagattcatatatgagaacggtgtgcctaaaagtaaaataaaaccagtctaaattacagaaaactgtgaagtagggaatacttaatttaaaattttagcttcccgaccacactatagtttatgatttcatagcagttacaagaaagtcgtctatcatcttaccattttccttattagatttaaaattttgttttcttccaattctttataattcacataatttttgcatgattggaattataatgtagatatactttttataataatttatgtgtgacacaacttcttttaggaatatatagaaattccaactagttgctggagtgtttctaggttgatattatgtgggtttgccttaagagtatctcatttaatattattcatattgaaagagtattaatctggaagttaaatatgtttattcttataccgtgacattggacaagttactctgcttctctatttctgtcacttgtaaagtgaggatactcccatttcctcggtcaacttctcagggtttttaaaagaaatcaaatgaaataataaaggtgaaagaactttgaatagtgtatataggcctgtacaaaatgcaagttatttcagcaaatttatttgcatatggacaataatatgctaacatctttaaacacatttcttttgtagaaggttaaataatactttttctaaatcccctctcccttgtcaaaatgatttctttaaagtataacacaaaagtcagtttcaactcaatttgtttaattttaattttaattttaatttttttgagacagggttttgctgtattggccaggctggagggcagctcattgcagcctccacctccagggctcaaggagcagctgggactacaggcactctaccatgcccagctaattttttttttttttttggtagagaaaaggtctcactatgttgtccaggcttcaactcaattttagacaaacagcccccaatcctgaattagtaaatttcagatcagtgaagtctgctaaatgtatataataagactttttttttttttgaggttgtggtgttattatacaaccaattggtaagcttttcttctaagagtatatattattcaacttcttatttttttttaaccttaatccctgaggaccaacaccatggcctggcagtgtccattggtacctcttataatacttaaaaatccagtgaccgggtactgtggcttatgcctgtaatcccagtactttgggggtcaaggcaggaggattgtttgaggccaggagttctagactagcctgggcaacataatgagactccattgctacaaaaaaaaatttgctgggcatggtggcacacacctgtagtcttggctactcgggaggctgaggtgggaggattgcttgagcccaggagttctaagcggcagtgagctgggatcatgacactgtaatccagccttgggaatgcatcgagaccctgtctctaaaacacacacacacaaaatccaaagtgttcagatgaagaagaaagagacagatgagttagtagaaaagcagattgagatgacaaaggaaaaaagtgttggatgatagaaaccactaaagaggcacaaatcgtttctttaggtactacgtataggctccacgacctaagtcacagaacatcagctgagttagcttaagtgtgctgcttctgttgaccccagttgtgagtatttcacttgcaaactgtagcctgcctgacctgctacaccaattgaccaacatattgtaaatacctcttgcatattttcatatgtgacaattatcaggactaggtatttagtttattagatggtccatgttatatatttatttttattgtggaaacttgaattcttgaactacaggcttcatatgaaagaggctttttttccctaccaacaaatattttttccttattaatttgccaggatgggaaaactaattgacatccaacagtggtactctgttgatgaatgaagggatacatgctttaacaccaagctctggtctttttattccatcattcatgagctgtggtggggtctcccctgagttgtggtggagagcagatctaccatcaaggccatggttgtttctcttccatcacctcctgaattgtggctgatgacatttggaagcattttctgcttaagcagcaatatagtcaatcatgtgtctttataatgaacaaatataatccagaattttttatttaatatttgctaagtttttttcttttttttcttttttttttttttttgagacagagtctcactctgtcacccagactagagtgcagtggtgcaatctcggctcactgcaacctccacctcccaggttcaagtgattctcctgcctcagcctcctgagtagctgggactacaagtgtgagccaccatgctcggctaatttttgtatttttagtagagacggggtttcgctatgttggcaggctggtcctgaactcctgacctcaggtgatccacctgcctcggcctcccagggtgctgggattgcaagtgtgaaccactgtgcccagcccacatttactgagtttttactttttctgtcacaactgaatatttctgtattttgttgactagaccattcttgaagtttaggccagagccgtttgttatgccagaggattctcacatgagtttaagtccatagaggttataaactctgtacaatatttatgtgccccgtccctcttgttatttaatacaacaattgattgcctgggacagctaaagaatttaggtcatgttgaatagggttccttctaaatttacatggcacggtaataatttgctacttagacatcataccctttatgggttcctctgtaggccattttagagggaaaacaatccatatttgtaataaagctttatgcttgcttactgtcatcacatacttatttgagtttaaagataactggatttggtgtcaaaagatcttgatttgcaactttgcaaatctagcaatgtgtggaagattataagccacaattatgcactactggtgggtaatctttctggaatataatttgcgacattcatcagaacagaagtgttcattgacctagcaattgcacttccagatttatgttaaggacataattggacaagttcagaaatatatgtggagagacatgtgtaaagacattcatagcaatgtttatggtagaaaattgctaacaacttaaatgtccaccagtaagatcggctacataaataaaaatggtgcatctgcacactggaacaacatatagccgttaaaaacaatcctatgtttttagatatggaaaaggacctacagcatattaagtagttaaagccagttataaaaccatgtgtataacataatattgttcatgcaaaattgtatatatattttaaaatgtatatgatatattcatttaaatttttaatatgtttgtatagctttttatggttcagttttttttttttttttgagatgaggtcttgctatgttgcccaggctgttcttaaattcctggaatcaggcagtcctcccccttcagcctcttgagtagctggcactacaggcatgtgccactgcacctggctggttcagtttttaaaacttacttggaaataatttaaatggattagaggttgcaaaaatgtacagggtggttctttagctcccatagtttcttgtaactgtaacatcttgtataactacagtacagtatcaaaaataggaaactgacattggtacaatccccagagcttattgagatttcagctgtcagtgatacggtttggatattttgtcccctccaaatctcatgttgaaatgtgacctccaacgttggaggtagggcctggtgagaagtgtttgggtcatggtggcagatccctcatgaatggctagcgccatcccctgatgatgagtgaattcttgctcagtttgttcacacaagatctagttgtttaaaagagtgtggcatctctttcctttctctctcttgcttcttctcttgccttgtaacatgctggctcctccttcaccttctgcaatgattgtaagcttcctgaggccttaccagaagctgagcagttgctaacaccatgcttcttatacagcttgaagaaccatgaacaaattaaacctcttttctttataaattactcaggctccggtattcctttatagccatgcaaaatggactaacacagttatttatccgtgcattcatttatgtgtttatgtatagctctataccgttttatcatgtgagtagatttatgtaaccaaccatgatcaagatacagtgcttaccctttatagccacacccatcctctcctccccatccccatccctaattcctggcagccactaattagttttctatttctgtagttttatttcagcaatattatgtaaatggaattttacattacgtaacattttgagaagggctcttttctttcactcagcatagtgtcttgaaatccattgaagttgttatggatctcacttgttcattcctttttaattgctaagtagtgttctgtgttgtagatgtgccatagtttgtttagacagtcactcactgagggacatttggatcattaccactttttggctgtaatgaataaagttgctatgaaattcatgtacaagtttttgagtgaacataagttttcatttctttgagataaatgttcaagagtacaattgctgtgttgtatagttagtgcatatttagccttataggaaattgccaaatggctttccagagtggttttatcactttactttcccatcagcaatgtgtgagagagccagtttatctgcctcctcgctggcatttgatgttgtcactattttttatttttgcaattttgataggtgtttagtgttgcctcctggtgattttgggatggttcatttttacaataataaaaagtaatagccactttcttttttcttttcttttcttttttgagacagagtctcactctatcactcaggctagagtgcagtggcatgatctcggctctctgcaacctctgtctcccaggttcaagtaattcttgtgcctcaacctcctgagtagctgggattacaggtgtgagccaccagacctggctaatttttgtatttttagtagagacggggtttcaccactttggggccagactggtctcaaaatcctgcctcaggtgatctgcctgtctcagcctcccaaagtgttgggattacaggcgtgagccaccatgcacatccaaagtaatagccattttattttaaaaaataaaaataatggtcatcctagcctgagcaatcaggcaagagaaagaaataaaaggtactcaaataggaaaagaagaagtcaaaccatctctttttgctgacaatatgcttctagaaaatcctaaaaactcctccagaagattcctagagcagataaatgacttcagaaggatacaaaatcaatgtacaaaaatcagtagcatttctatacattgataatattcaagctgacaaccaaatcaagaatgcaaacccattaacaacagcctcacaaaaaagaaaatacctaggaatacatttgcccgaggaggtggaagatctctataaggagaacaataaaacactgctgaaagaaatcatagacaatacaaacaaatggaaaaacattccatattcatggatgggaagaattgacattgttaaaatggccatactgtccgaagcaatctacagatacaatactattcttatgaaactaccatgtcatttttcacagaattagaaaaaactgttcaaaaatatggaaccaaaaaaagagcttgaatagccaaaacaatcctaagcaaaaagaacaaagctggaggcatcacattatctgacctctaagtatactataaggctacagtaacaaaaccagcatgatattggcacaaaaacagaccaatggaacagaatagagaacccagaaataaagccatatacctacagctatctgatctttgtcaaagcggacaaaaatcataaggaaaagacttcctattcaataaatggttctggaatagctgaccatatgcagaataatgaaactggaccactacctttcaccatataaaaagtttaactgaagatggattaaagatttaaatgcaagaacacagagtgtaggaatcctacaagaaaacctaggaaacaccattctggacattggctgtgggaaagaatttgtgactaagttctgaaaaacaattgtaacaaaaacaaaaattgaccagtggaatctatttaaactaacgagcatctgcacagcaaaataaaaaatcaacagagtaaacagacaacctacagaatgggagaaaatatttgcaaactgcattcagcaaacatctaatatccagaatctataaggaattcaaacagttcaacaagcaaaaaccaaataaccccattaaaaaatgaggaaaaggcatgaatggacaattttcttttccttctttttctttctttttttttttttttttgagatggagtctcactctgtcacccaggctggagtgcaatggcgcaaccttggcgcactgcaacctctgcctcccaggttcaagcagttctcctgcttcagcctcccgagtagctgggattacaggtgcccaccaccatgcctggctaatttttgtatttttagtagaagtttcaccacattggtcaggctggtctcgaactcctgacctcgtgattcacctgccttggcctcccaaaatgctgggattacaggcgtgagccaccatgcccagccgtgaatggacagttttcaaagggagacatataagaagccaacaaacatgaaaaagtgctccacatcattaatcattagagaaacgcaaatcaaaactgcagtgatttgccatctcacaccagtcagaatggtgttattaaaaggtcaaaaaataacagatgctggtgaggctgcagagaaaagggagtgcttatacatcgttggtgggaatgtaaattagttcagccaccatggaaagcagtctggagatttctcaaagaacttaaaacaggattaccatttcacccagcaatacctattactgggtatatattcaaaagaaaatannnnnnnnnnnnnnnnnnnnnnnnnnnnnnctcacacctttaatcctagcactttgggaggcctaggcgggaggatcacttgaggtcaggagttcgagaccagcctggccaacatggtgaaaccccatttctactagaagtacaaaaattagccaggtgtggtggcatacacctgtaatcccagctactcaggaggctgaggcaggggaattgcttgaataccgggaggcggaggttgcagtgagccgagattgtgccattgcactccagcctgggtgacagaaagagactccatctcaaaacaaacaaacaaacaaaaaaaaaacagaaaaaacaacagtaaattggataaataaaatgtgctatatatatgccatagactattatgcagccataaaaggaatgaattcatatcctttgcaagcaacatggatgcagctagaggccgttatcctaaggaaattaacataggaacagaaaaccaaatactgcatgttcttacatacaggtggaaactaaacattgattacttatgtatataaaggagaacaatagacactgggtactactatggggggaagaaggagggggacaagggttaaaaaactgttgggtactttgctcattacctgagtgatggaatcattcatatcccaaatctcagcatcatgcaatatacccatgtaacaaacctgcacacgtacactctgaattcaaaataaaagttgaaatttaaaaaaaataaaaaacctagacttaaaaaagtctttgttctgccacttagtattttctttatcagtgtgaatatctcatctataatagaaatactacctgctattcctttttcacaagatggctgtatcaaatgaaatcatatattcaaaaccaccttgtaaactataaaacatcatacaaatgtaagttgcttaatactgagagatgtcctaggtgtgaacaaggatgttgattttctttgtcatctactaggtttatacttctattgtaatgaaacattaatgtaaataaaatcaaagcagatcacttacagttgtttaatagagctgctttggtactatttcaaaacgtataaccacttcaaaattactaaatgatgttttatactcccctcctgctcagtgcaggggaagataagggaaggctgataaattagtaatttaagtgtgtattaagggataaataaataaatatttgacagttcaatacttatgggttttcttgttggttttggggagttagggaactcatatttattgagctgtgtgctgggcactttccacacattgccatatcatcttcatagctgtcctatgagttggtggcatttttacctccattttacagatgagaactgcgattctcaaattaagtaatttggctaggtcataccagtagttaatgaagaagttggaacttaaatatgcagcttcaaaaatcgatcgctttccattataccaggggcatatctgcttttcagtaacaagcacaagattggaaatctatgtgagcagtgtgcaggagttttgctaattgatggcagtggttaaactgagaggtagagtgcacttggtgtatatgttttaaacatgatccgcctatgaatccagtgggtgcagagacgttccatattcttgctgttggaaatccttcctagtattttaatttggtctataattttagtggaattaaacaagaatttttaaagattatgtacctgattgtgttgtgatttagtaacagttagtggttcatcaaaatctgctagccagacacttggcagcagtggttaattatatagggattgttgtgagcacatggttagactttatcatatactctagtggagacctgattattgctgtcgttctcattatctttttcttcccccctaaaaatctcaggatggttgtagccagggtcagatatttaaccattatatgccctgaccatcttgctgctgctctaagagttttgttaatgtttgtgttttattttgtgcttaatgactccccattagatgtaggatggaatccaaactccttagcatgacataaggatactccattcttttgctctgatttaccttaccagtcttctctgcaacctacacttcatgtagagggtgtgaggttgaggttgatgacagttgtctccctagggagattctcttcatgaaatccaaggaagcaaacagaatatggcccagaagtggcaatggtaatgtttaagagcttcctctatagttgtgaacattttcttttttctttttttttttttttgagacagagtttcgctcttgttgcccaggctggagtgcagtggtgtcatctcggctcactgcaacctccaccttccgggttcaagtgattctcctgcctcagtctcccaagtagctgggattacaggtgcgcatcaccacactcagctaatttttgtatttttagtagagatggggttttgccacgttggccaggctggtcttgaactcctgatttcaggtgatccacccgcttcagcctcccagagtgctggtattacaggcatgagccacagcacccagcctagttgtgaaaattttcataaccacttccttactgaattatcttccgggtagcccaatgaagtttcttaaccgtgtttcagattttgtgtgtgtgtgcgtgtgtgtgagagagagagagagagaaaggttgattgattgattcttgggcatagttctccaatcccttagtaattgtttattgtgatgtcaccagcaaaactgacacaaagaaatgacagatgtttgagatgaggatgccccaattaccctgatttgatctttcacagtgtgtacatgtatcaaaataccacatgtatcccacaaatatttacaattattatgtatcagtaaaaaacaaaataaaactgagattccagttttgtgactcccatctgtttatgttgctgccaaagtgatagtgtggccatcctctgagaagaaggcttctaatatatggattgcttcagggagagtcacacctggtcattggatcagtatggttgttgagagtttagtttgtttagctactttgactaagagattactagttttaagtatttatccctaatttcccactattgacagttttcaaattgacctggaggtatggaatttatgtatgcattaaacttgaagtatactgtgtgatacttatttagtctgaattagtatgaatatttgacactgcctttttgcccccttttgtgtgtttttactgcccaaatctgccttcagaaacaacatttggtttctaattgtaatattcttggaaacactggcatatttttacagtaccattttacttttatttactgcaaatgatggtttgttagttgcctgctgccagcacatctgagctcatttgtttaactaaaacagcattgtgcatagatgcctgtaacaggcagcaacagttaccaaccaccccagttccttactacctcattatagctctaaatcaagcaaataggaaagcagattattcttaaaatgttccaagaagtttagaaaattgagggatggaaggatgaaaggaaaggaattctaatgtaacaaacaattggtgtgttgcttttggcaggggtgtgcctggctgatttcttctgtagaaataactaacacttcagagtgcagaaattgcaggcatcctgcaacaaacagagctctatgactcctttagttaataaataattaccaagtggtttttttctggctgagccactgtatcagacacagtgggggatgtataagtgaatgagatcttcctgttctcttggagcttataatgtgggctctgaagatgcttctgctctaaagtgttgattgttgaacgaggcagtggcagtggtgctgtttcagattgtggctgtgtgttgggggatccaggcctgggggacatagtcacagaatggcaggtgctggctggctcaccacagtggggagctttccagataattctgacaaatcagactgcttcaaaaggatatgctcttttatatttggaaagaaagaaatgtcttttagtctgggtgctatggctcacacctgtaatctcagcactttgggaggccaaggtgggtggatcacctgaggtcaggagttcaagaccagtctggccaacatggtgaaacgtcgtctctactaaaaattcaaaaattagccaggcgtggtggcaagtgcttgtaatcccagctacttgggaggctgaggcaggaggattgcttgagcctgggaggcagaggttgcagtgagccaagatcactcactgcactccagcctgggtgataaaggaagactccgtctcaaaaaaaaaaaaaaaaaaaaaaaaagaaaaataaaaataaatgtcttttaaaaaatattttaacagaaatttaaacttgagcggcagaccttgccttgagggctggagactgggaagtgtttcctaaggagccaggggaaataattctgtctcctggtaatgaaggtctgagtggtgtctgacagtgcctaactgcctgctctgtaccaggctggaatactgtgatgaacaaggagcccacaatctagtgggggccatagacaagcaactgggcaatcttactgctgcgtgctcagttttatgattgagagctgttgggtgttggggtggagaatggacttcttaccttgtcttaggtgagacctgatcaaagaaggcttcctggaaggagtgatgtccaaaccaacctcactaatatacgttggaattaatccccttttcaggctaatactgttgtaaaaataaaccagagccctgttttggtttttgtttatacccaaaacaaaaatggagagactgaacttggtattccagccgtctagaatacttttccagctttgtagtttgccattcccctgtgttgattaaccaccccttcccagggcatgccaggctctctgtgactgcgatgcctctgcatgcactattctctttgttctgcctgcctgatgtctcttggcccttcaggaagaatagttacttcctccaggatagcctctttgattccttctatggtacgttgagtgcacatcctgtgagctcacacacagggctggtttcataattcatacttcccctgtactgaactgtctgtctgctttttcattcctccatgtagcctggaggcagaggcagcatctttcacgaagcctagcatgtcctaggcacccaagcactatttgctgatgaacaaatttagcagcttcgaagattacagccatatgtgtataattgaaactcttggttccagtcagctttaaaagagagtgccattgactgaagaaagtgaaatagattttatgcatgtggtctagttattaatttcataaagctttttacaatcctttgcattttatacctcttttactttttgtctgagtaaccaataaaccgagtaattcatagttcccatttcttgccaactactaatgtgtatcattaaatctgaccacagtgatttattaattagaagtcttctggttgtcaacaaaaatcagttttacttactatatgccagaaaaaggggaagatgtgatgaagacactggagtgtctcatagaatccaagatcaggaacacactcaggcttctggaagaactggtcccaggaattggaaagccatcagcaatcctgagggtcctttctgtttatgtctttctttctgcaaagcttttactcatctttcttactaactggctttctctgccactctgtcggtagagggtggcctcccacagccctaaactatgcagccaagttctagccaaatggaaagcctgtctttccatctcaattctaaattctctaagacttgggctaggcttgggttagatgtctatccctggactagtcagctgtggccaggagcggagacatgctgcacatatctgtctgcctctgctcacctccgaaaagtaggtgggaagatagaaaaaggggtagggaggcagcagacagagagacagacagcagagagacattgtaaggctggcagacaccttataaatatctaatatggtgagtctccataaactactacccttaaactatatcataggatcacttctaggttattttgttaaaaaaagtcagtcctaggtgaaacttaaaaaatttaactttaaaaagacgatatcttttaaaatatgcatataatttgagactcttaaggtaacgggatattcactatagttagtaagtcttagctttgtgtgtatatatgatttttatgcatgacactctttaattgctgggaggttctagcagctctgtccagcagaaatacaagataagccacatttgtaatttaaggttttctagtagccacattgaaaaagtaaaatgaaaaaggtgaatttaattttaatgtattttatttaaccccagtttcccagatataatcgttatatgaatataaaattaatgaaatgttttacattcttttaaaaacctttgaaatatggtatgtattttatgctttagcaaatctcagtttggaccatttcaggtggtcagcaattacacatggctagaactaagagcaatcagttttcttccacagtttttctaaaattttcttgtcaaaaatcttgatggtatgaattactcttttaaaaagtgcacttcaccagcaacagaaaagaaccctggaggggtatgggttttaaagctggtacaaaagagttgcccatttggaggatttactgcaccatgtgtattggtaaaaaagaaaacataatttttaaccaagtcaccaggctctaaagccagttcttgttcttctcagacttctgattcctggaattttactttaaactccttggatgcctcagtttgcttatctgtaaaaataagatttataatggtcctgtcccacagaagagattttcatggaatttaattgcaccaatatatttgaaagtgttttgaaagatatttaaagggttaaacaaatgtgaagcattattttaatttatcatctatgggtaaattactacattttggaatcaataatagttatcatttttaaaaagttttattttgttaattgacacataattgtacatatttatggggtaccatatgatgtttcgatgcattatacatagtgtaatgattaaatcagggcaattagcatatccatcacctcaaacacttgttatttctttgtggtgagaacattcaaaattattttagccattttgaaatgtaaagtacattattgttaactctagtcaccttactgtatgatagaacattagaacttatcccttttatctaatgtaactttatacctgttgacctctctccctctccctgcctgtcctacccagccttcagtaccactattctactgtttatctctatgggatcaactttttaagttttcacagatgagtgagatcatgtgttattcgtcttttgtgcttgacttatttcacttaatgtcttgtgggttcatccaggtgccgcaaatgacgggatttcatttatttttatgcctgaatagtattccattgtgtatatgtacctcattaaaaaaattcatccattgatggatacttaggttgattccatatcttggccattgtgaatagtgctgcagtaaacatgagagtgcagatatctctttgacatactgattttgttttctttggatatagaggttgagtatccctaatccaaaaatctgaaatccagaatgctctaaaatccaaaactttttgagcactgacgtgatgcttagaggataatgctcactgtactattttggattttggatttttggattagggatgctcagctataatgcaaatatttcaaaatcggaaaaaaaaatctgaaatcagaaatgctcctggtctcaagcattttgggtaagggatgctcaatgtttatacccaacagtcggattattggattatatggtagttctatttttaatttgttgaaaaacctccctactgttgtccttaatggctgtactaatttactttcctaacgtcttggtctgttttgtgttgctataaagaaatacctgaagctgggtaatttataaagaaaagaggtttatttggctcacacttctgcaggctggtaccagcatctgcatctgatgagggcctcaggctgcttccactcatggcagaaggtgaaggggagctggtgtgtacagagaacatatgatgagaaagggtgcaatggggcggggaggtgccaggctctttttcacaaccagtactaatgggaactaatagagtgagaagttacccacttctgagggagggtatcagtctgttcataagggatctgcccccatgacccagacacctcccattaggccccacctctaacattggggatcagatttcaatatgaggtttgtagggatcaaacatccaaattatagcacctactaacattgtatgagagtttccctttctctgcatccttgccaacatttgtaattttttgtctttttaataatagccattctaactgggtgatgtgatatctcattgtggttttgatttgcttttccctggtgattagtggtgaggtatatttttcatatacctattgccatttgtatgtcttctttttttttttttagacagagttttgctcttgttgcctaggctggagtgtaatggcacaatcttggctcaccacaacctctgcctcccagtttcaagcgattctcctgcctcagcctcctgagtagctgtaattacaggcatgagccaccacacctggcttattttgtatttttagtagagatagggtttctccatgttggtcaggctggtcttgaactcccaacgtcaggtgatcctcctgcctcagcctcccaaagtgctgggattataggcatgagccactgcgcctggccttgtgtttcttcttttgagaggtgtctatttaggtattttgttcatttttaaattggatttttttttttgccattgagttccttatgtatcctggatgagtcccttgtcagatgcatagtttgtgaatattttctccttttctgtggattgtctcttcactttgttctttcctttgctgtgcagaagctttttagtttgatataatcctatttgtctatttttgcttttgttctctgtgcttttgaggtcttatccaacaagtccttgcccagaccaatgtgctgaagcattttacttaagtgtcttctagtagttttcatagtttcaggtagtacatttaagtctgtattttaagttgatttttgtaagtggttagagatagggttctagtttcatttttctgcatgtgaatattcagtttacacagtaccatttgttgaagagattgttctttccccaatgtgtgttcttgatgcctttgtcaaaaatcatgtgtggatttatttctgggttctttattctgttgaactatctggaaaagaaataaggtaatacatttacagtagctattaaaaaaacctagcaataaatttaactgaggaggtaaagatctctgcaatgaaaactataagatattgatgaaaaaaattgaagaagacataaataaatgcaaagaatatcccttgttacgtatcggaagaataaatattgttaaaatgtctatgctatctcaagtgatctacagattcaatgcaatccctatcaaaataccagtgatatttttcacagaaatagaaaaaaaattctaaaatttctatggcaacacagaagacccagaatagccaaagcaatcttgagcaaaaagagcaaatctggagatattacgttacctgatttcaaaatatactacaaagcaatagtaaccaaaacagcatggtactggtataaaaaaaaacagacaaatgaaacagaatctatcatttgttgaggacttactttgtgccaggcactgttctaagtgctttatcgatatcatataattaatttaatcataataaccttatgaaggtactgttactatttctgttttatatatgaggaaattcagacataaagatttaacaaaccagcccaagctcaactatctagtaagtagttgaactggagttgaaatgcacttaaaaaaattgtggtgaaatatacacaatgtaaaataatcattttaaccattttaaagtatatagttctgtggcattaagtatattcacattatcatgcaatcattaacaccatccatctctaaaactttttaatcttggcaaactgaaactctatactgactaaacactagttccctattctcccatccccagcccctggcaatcacctttttactttttctctttgagtttaactcctctaggagcctcatataagaggaatcatacaatatttatctttttgtggctggcttatttcacttagcataatgtcttcagggttcattcatgttgtagcatatattgaaattccctattttatttttatttatttatttttattattattttcttttgagatgaagtttctctcttgttgcttaggctggagtgcaatggtgccatctcagctcaccgcaatctctgcctcctgcattcaagtgattctcctgcctcagcctcccgagtagctgaaattacaggcatgcaccaccacacccggctaattttgtatttttagtagagatggggtttctccatgttggtcaggctggtcttgaactcccgacttcaggtgatctgcccgccttggcctcccaaagtgctgggattacaggcatgagccaccgcgcctggcaaaattccctatttcttaagactaaataatattccattgtgtgtatgtacatttcatttatccatctatctgttggtacacatgtgggttacttctacctcttggctactgttagtggagctgccatggacacgagtgtacaactatctcttcaagaccctgctttcacttcttttgggtatctacccggatggtaattttatgtttaattttttgaggaactgccatatttttgccatagtggctgcatcattttacataccatcagtgcacaagggtcctaatttctctgcatccttgctaacacttgttactttcttttttccttccttccttccttccttccttccttccttccttccttcattccctccctccctccgttatttcctcctcctcctcctcccctcctcccctcctcctcctcctcctcctcctccttcttcctcttcttcttcttctttttttttttttgagatggagtctgactctgtctcccaggttggagtgcagtggcacgatcttggctcactgtaacctctgcctcctgggttcaagcaattctcctgctgcatcctcccaagtagctgggatcacaggcgtgtaccaccatgcctggctaatttttgtatttttagtagagatgggtttcaccatattggccaggctggtcttgaactcctgacctcaagttatctgccctcctcagcctcccaaagtgctgggattacaggtgtgagcccacctcgcctggcctctttttttttttttttttttttttttttaaataaaagccatcccaatgggtgtggagtagtatctcgctctggttttagtgtttcactaatgactagtgatgttgagcatgttttcatgtacttattggccatttctatatcctctttggaaaatggctatttaagtcgttggtccattttaaaattgggttgtttggtttttgttgttgttgagttgtaggagttttaaaagtatattctggatatcaatctcttatcagatatgtgatttacaagtactgttttccattctgtgggttgacttttcactctgtagatagtatcctttgatccacagaagtttttaattttggtaaagtccagcatgtctgtttttttctgttgatacctgtgctttttggtgtcacatccaagaaattgttgtcaaatgcaatctcaagaaacatattttcttctaagctttatttctgtctctgtctatctgtgcctcttttctctgtgtcatcttgagtctgtctctgtatctgtttctgtatgtttgtatctttgtatcttttttctatatatttataaaccaccaaaacatatatgtatcgtctctcttttcttgctttatttcttccttttcctttttttctagaactttttgaaagtattgtagcaatcatgacactccatgtatttcctaaaaataatagcatatttctaaactataattagtactgcctttagaattgggcacacagggcccttgccttgagctctctactttggagtgcctttcttgaatttttctaagtctccctgctgccttaatgcctgaaaggcagggtgccccaagctcttctctttaggagtctcatatttagaaatacagtaaatttcctaattatattgaaaattgaagcctaacttttttttttgctgatcttattgttcactactgtgcaccatatttttcttctaaattatttttcttatctttatatatttctttaactgattagcatgtacatatttagtattatagtcattaattacctttattcttctgtctctccagtagtgagttgaaactcttggaggaagcaaccatttcagtctgcaggtcattaggtaagtgggaaaaatgtgtgtggggtgttgttttcaaattttgttttagattttgatagtataatatgaactgaattaatgaagtaattactcttctttgatagcaatagtaataattttttctatttgtggcattcacagatgctgctagaaggtacccttcagtcaatagcaatatgacacatgcttggctatatctgcagtagtggtaatggactctgctaagccatagacactctttcgtcttgttctttttgtgaattttgaaatactgaaaataatgtgatttaccaagtgctgttattgactatgttcaccagaacaatattaaaatctattaagaatgtatattaggaagtttccataacaacttgatattatggcaaagatcatggaatccagaatcattttatgattttaatttcagctgtgctacctattagctgagccttaatttcctcatatagattgaggataaggacaactatttacaggattcttataaggaaaaattaggtaatatgaaatattcagtacaatgtgtgtcatgtagtcattgcaaaccatttatgtcagcaaatgttacccttttcaggtcttgtttctcaaatgcttaactttcaagttcatagcaattggaaggaaattgtatatatttttaaaatgcaggcagttatacttagattgcattggtgctttgaaaagtaagacaatgtgtctgtgaaatacctagggtacaggaatgtaataagtgagaacaatattctgttttaaaatcaggctgtctaggccggacacagtggctcacgcctataatcccagcattttgagaggctgatgcgggtggatcacgaagtcaggagttcaagaccagcttggccaagatggtgaaaccccgtcactactaaaaatccaaaaattagcaaggcatggtggtgggcgcctgtaatcccagctacttgggaggctgaggcagagaattgcttgaacccgggaggcagaggttgcagtgagccgagatcgcgccactgcactccagcctgggcgacagagcgagactctgtctcaaaaaacattaaaaaaaaaaatcgagctgggggnnnnnnnnnnnnnnnnnnnntcctgggcttcagtgatccttccacctcagcctcctcagaagctggggctataggtgcatggcaccacacctgcctaatgattttattttatttttgtatagatgggggtctcctgtgttgccgaggctagtctcaggctcctggccgcaagccttcctcctcctaccttggacccccaaagtgttgggatattacaggtgttagccaccgtgcctgggcccaaatatttttgtttttaaaaacaaactatgttgataatgaaaaggtgttattgtagtagttgtcttgccttacaaccatagcttagggaattttttgctaaatagagctggctttcaaaagccatgtcgcaattcagtgctgaaaattaaggagttttatgtaacaatattagtgtagttactgtgataatggcttttaaggtgactttgggtttttaaaaaaattataaaattaaaagatgaaaaaacaaaaatataacaaagcaatgagaaaacaaagaaaaaattacattaagaaaactgaaagtagctgggagtggtggctcatgcctgtaatactggtaactttaggaggctgaggcaggagggttgcttgaggtcagagttcaagaccagcttgggcaacataataagaccccatctcttacaaaatctacatcttacccatctacacgcaaaaaaattgaaaaaacttaaccaggcatggtggcatgtgcctgtagtctcagctgcttgcgagattgaggtaggaggattgatcgagcccaggaatttgaggctgcagggaaccatgatggcgccactggactccagtctggacaatacagcaagactccaaatctaggggcgaaaaaaagcaagtaatatttactcattatacataatgtggaaagcatactaaaatgtaaatgaggtagtaattgctcataatttgaaaaccctgacataggcattgttgatatttttgtattttttcttctactacttattcaatggatataaatttatatatatatcatccaccacacacacacacacacagacacacacacacattttaatctgtgtttttcacttgacattgtatcaggaatgtgttacatgtttaaaaatacttttgggaacagcaaaacaagatatacatttattgccccaaattccagtaatgtgatggtatggctaaaataaaaatcatctcatattaaacagtacatgtgtaatcactgctaatcttttgtgacaatttcatataaatggtattatttatattttgtttacacgcagcaacatgtcaggaacctcttcacatcaataagtataagtgcatatcaactttaagggctatgtgagtgtacttagtttcctttttgaaaaaaaaatttttttaagtgctggtctactggcaacaattttccttctcttttttcttttttttttttttgtctgaaaatgttctattttttttcttggcttttgaagcatatgttttgctggatatagaattttagatagacgttaatttattttccgtactttaaaggtgtcatttcgttattttctagcttttcttgtttttgttgtgaagaaagcagtcaaccttattgttgcttctttgaaaataatggaatttttaacttcggctgcttttaagtttttctttttatcttttgattttcagtagccttagagtgatgtgctgaggagaggttttctttgtttttttgtcgcctgaggtttgtagagattcttaaatctgtgagttggtgtcttttatcagtattggaaaattcttagccattatgtgtttatatataaaatttttgttctattctgtctctcctctcctcctgggacgcttgttacacttctgttcaatgttttgtttccattgtgtcccatatacttgttaggccttttttcttttgtagtttacattctttttctctctgaccttcaatgagatattttctgttaattcatctttagtttctaatgttttccttttttttatttttatttttattttgagacagggtctcactctgtttcccagctagagtgcagtggcactatcaccgctcactgcaacctcagcttcctgggctcaagaggtcctaccacttcagcctcctgagtagctgggattacaggcatatgtcaccatgcctggataatttttaagttttctgtagaggtgggatcttgccatgttatgttgaacttctgggctcaagtgatcctcccaccttggcccccacaaagtgctgggattacaagtgtgagctactgtgcctggtactaatctttccttttgatatgtcccatttgctgttaaaactatctactgagatttttaaaacaagcttttaattttagaatagctgtagatttatggaactgtttcaaagctagtatagagcattcttgtatactcttcagctatttcccctattttattatcttattttagtatggtacatttatttcaactaaggaatcaacattggtacaggtataccccagagatattgtgggtcagttccagaccactgagataaagccagtattgcaataaagtgagttgcatgaattttttggtttccccatgcttataaatgttatgtttacattatactatggtctatcaaatgtgcaataacgtgttaaatgtatgtatcttaattttataactgtgttgcaaaaaaatgctaacacatcatctgagactttaatgagtcataatcttcttgctggtgacaacatgacatcaaagatcacggattcgaccaggcacagtggctcactcttgtaatcccagcactttgggaggctgaggtgggtgtatcacctgaggagttcaagaccagcctggccaacacagtgaaaccctatctctacaaaaatacaaaaattaactgggcatgatggcagttgcctgtaatctcagctactcgggaggctgaggtgggagaatcacttgaacccggaaggcagaggttgcggtgagccgagatcacaactttgcactccagcctgggcgacagagtgagactccgtcacaaaaaacaaacaaacgagatcactgattaaagatcactataacagatataacagtaaaatgcttgaaatattgcaagaattggctgggcatggtggcctgtaatcccagcactttgggaggccaaggcgggaggattcttgagtccaggagcaacatagcaagaccctgtctctacaaaaaactaaaagaaaattagccagacatggtgactcctgagtagctactcaggaggctgagatgggaagatctcttgagcctgggaggttgaggctgcagtgagctgtgatcacactacgacattcagcctaggtgacagagtgagactctgtttcaaaaaaaaaaaaaaaagtaaataaatacgaagaaattttgcaagaactaccaaaacgtgatgcagagacatgaagtgagcacgtattgttggaaaaatggtgctgatagacttgctcactgcaaggttgccacaaaccttcaatttgtaaaaaatgccatgtctttgaagcacaataaagcaaagcacagtaaaatgaggttatgttaattttattgactaaactacacccttcactcagactttcactaactttctcctaatctgccttcactgttccaggatcccacctagggtgccacatgacatctagtcatcatgtatttctctggtctgcaacagtttctcagatttcccacattttttatgccttttgatgattttggggagtattagtagggtattttccaaaacgttcctcaatttgagttgtctgatggctttctcatgcttagactggggttataggtttgtggaaggaagaccatggaggtgaagtgctgttctcaacacaccgtatcaaggggacatgctattaatatgacttatcactgatggtgttgatgttgatcacttggctgaggtactatttatcaagtttcttcagtgtaaagttgtttctttctctcctgatcccttcattttcaaaggatagtttttctagatatagaattcttggttaacattttttttctctttcagcactttgaacatattattctactgccttctggtctctatttttttcagataaatctgacgttaattgtattattgttcccctgaaaatcatgagaaattttttcctgctgcttgtaaggtgctctctttgccttttaaaagagttttttggccaggcatggtgactcacacctgtaattccagctctttgggaggccacggcaggaagattgcttgaggccgagagttagatgccagcctgggcaacatagcaagaccctgtctctacaaaataagaagaaaaataaaaattaacctggcatggtggcatgcatctcttagatgtgtagattaatgtttttcaacaattttgggaaattcattgcctttttttttctttttttaaggaatagggtctcacactcttatccagtcttgtcttgaactcctgaccccaagcatgcctcccacctcagcctcccaaagcactggccattatttttgttaggctttttgtgtttagctttattacttttttcctgaatgtacacataaggttttctggatcagatttctttttttttttgagacagagttttgctcttgttgcccaggctggagtgcaatggtgtgatctccactcactgcaacctccacctcctgggttcaagcaattctcctgtctcagcctcccaagtagctgggattacaggcatgcaccaccacacccagctaattttgtatttttagtagagttggagtttcaccatgtcagtgagactggtctcagaactcctgacctcaggtgatccacccgccttggccttcgaagtgctgggattacaggcttgagccactgtgcccagcccagatttcttattaaatacttcacagtaaataagacgtccattggtccttctttgtcctagttcttaacccactaggatgatgtggtgagagccaggtcagttgttttttatgatagtcagactccctgtaggtgagggatgaggaaaaacgtttgccagctttataaagggtaaaaaagcagctgtaccatcctctcctgaaagagtgtgctctttagccctttggcatataaatacaatcttttcaggagccgggtatcctcacttcttgttttggcattttaacctatggatatctccaagttctgtggcctcatttgtcctttttttttttcttttttctttttgttcatgagactttttcctttaacccttggtgataaatatttctcattatgctttttctctttatggtttttcctataatttgatgaggtgttttgattggtgtacgaagatctttttcagttcagaaggtttttttttttctttttttcattatggctctgattttgtgttttagtttcttctccctacctcttgatcacctgtaatgttcaggttggatctctgttctttactttctgttatctttttgtctctgttcttttctcatatttcttcctttgtatgattgatttcaatgttttctacactgccagttctcctcttttactattgtagtgtatgttttagctgttattgcatttttagtttatttcttaatcatttctagtcgtttgtagatcttttaatgtcaggctgctctcttcttttttttttttttttgagatggagtgttgctgtgtcccccaggctggagtgcagtggcgcaatcttgctcactgcaaccttcacttcctgggttcaagccattgtcccacctcagcctcccaaatagttgggattacaagcatgcgccaccatgcctggctgatttttgtatttttagtagagatggggtttcaccatattggccaggctggtcttgaacttctgacctcaagtgatcttcctgccttggcctcccaaagtgctgggattacaggtgtgactcactgcacccagccttttttttttttttttttttggagacatggtctcactctgtcgctcatgctggagtgcagtggtgtgatcatggctcactgcagcttcaacctcctgggctcaagcaatcctcctgcctggcctcctgggtagctgggaccataggcatgcgcaaccacacctggctaatttttgtattttgtgtagagatggggttttgtgatgttgcctaggctatcttgaacttctggccacaagcaattctctcaccttggcctctgaaagtgctgggattacaggcgtgtgctactgtgcctggcttgctctcttttcattcatgcatttcccccagtggatttctgttcttttttaaaaaataggtgattaattttcctgttgtctactgttgattgctgtgtattaaaattcttttggcaattttgatttagcttttcttctgaggtttcagcgtaactcatttcttatcctctggttgctgttgttgttattttctccttttcattaaactaacacatatttatggagcacctactatattacaggcattatcctataagcttgggctgtgactgcaaaaaacactgacccgggtctctgacctcatggagctgtctatttcattgaggaaccagagaataaataaatatatctggtttatacaatgttggctgttcagaaaaataaagcagagtaaggggatggggtgtaacccatgaagctgcattgtttgctcccagagaggctgtgtttatttcctctgttgcttatatagatcctatagatgcttgttgaatctgctgttattttagtttgagagcaagttgatatagtttcccaacctaatttatagagcccaagaaggttttatttgtccaagtttcttagtttaaatgggaccttcattatcctcacttcttggctttggggtatgagggaatttggaagttcccagattgaacatctgtatcagtgtctttctacctctccctccaccgtatgctgctgtgttgtccaggccgaatatgtatctctaaataaggattcttaaaaaaaaataccactatcttattaaaaaaacaacttttaatatcacaaaatattcagtgttcaaatttgtaattgtctcattttgtttgaattgggggccaaataagttcacacattatttttggttatgtctttacatttcttttcaaagcaagtttcccttttcatctgtctttttcttcttttccctctctcagtgtatttattgaagaaaatgggtggtggagtttcccacaacgtagattttgttcattgtatccttgcgtggggtcatcttgtcctctctcctctgtattttctctacattggttgttggattttagagctcatgagtctttcggtgagatcttagaaaagtttgtttcagggtctagaagcaaatttaatctctcatctcaaacagaaatcctgtctacaatacccttatctgaatgttacccaaactttgcttgaattcttgtagggatgggggcattcccttctttacacaagcatcactagttaacagactgctacaagttcaagctctagcatcaggtaagttagctctttattaagcattcttgttatcttaattttacagatgaggaaactgaggcaggggccagttaggtaagttgccaagtgttctacagctggtcagtggtggaactgagatttgaacttcgtcagagtctataatctagtcccattacacttttctgctttcctgtcggacctcctgtgttgttactctggctcccgaagctcattcagcttcaacatagcattttatttgcaccaattaactgtgatcatgtaaaatttcttttcttctaccattgagatattttggaatcttgaatctaccatggagtattgtttaaaatcattgagtgtatttaattttattaacttattgccctaatcttcatcttatccaaaagagtatcatggaaactttttaactgtcttggtaggtaagctccatgaagacagggagttctctttacaagtatctccttagtatctgaaacagtgtgggcacatatgagtagctcaataaatacacgctgattgagtgaatcagtgaagaaggtacacggcgctttaattacatcaatcaagtagtcgggttactctttccaaaaacacaagatgttttgttttgtttttttaaatagctaatcatttatacattcaacaattacaaggccattcagtaataaagggggctgttgaatgaacaaagatttcaaagttgggattctgagtggtgattgtagtcatgttaccctcagcttagtttgtttcagcattttgtttggatttacaatagctagataatattaagtcccacagagatgcgtttgcaaaccttaactattctttttttttttttcttaaaaagtttaccctgaggtctctgggtattctttcattaaccctaaagctttaaagaggaataggacatttttgtttcaaagtgaaactcttaacattatctactatctgatcacatatctattcttgattgtgaaggctggataaaaactccgctgattgacaacaaatgttgcaccttgctactcacagtgggattctccagccagcagcagcagtagtggatgtcactggggaacggtagagatgcagaatctcagtgcacatttcacacatgtgcagtccatttgcatttaaataagaatgacttgtgatttaaatgcacattaaactttgagaagtactgtcagcttcagttaggagtatggtggacctgggattctgaacttccaccaagctctcagataatgctgttgtggccggtccatgagccacgcttggaatagcaaagtgcttgacattttatcacagttagaaagttaggcagttacttgaatagactcttaagtcatgacaaaaatatatatgcagcagggagtgagcttggcagttagtaagcacaatgcaggtatgctgtaatgctgtacttattcccatgtataatattttaaaatatatatgtatgggcctgaattttaaaaaaatattctggaaaacttcatttttttcaaatcttgacacatttcagtaagttcaaatataccagcttgggcaacatagggcaaaaccatctctacaaaaaatacaattagctgggcatggtggtgcatgcctgtagcactaactacttgggaggctgaggcagaaggatcacttgaacccaggagctcaaggttgcagagagctatgattgcaccactgctgtccagcctgggtggtagaccgagaccctgtttctatgttaaaaaaaaaagaagttcaaatatatgcgaaattcccagatctgcataagaatgaactttcctggcagcctaagtcagtgtgtttgagtgtttgcatttccagttttcaaactagttaaaaatacttcagaagagaaacaattatccaggactctggaatctcacattttgaaaaccattggtcaaggaaaaagactgtgtttgctactaacatattgttgactttaagctcagcgcttagcctttctgagcctgtctcttcatcagtcaaatggaaggttctacaaaatagtctctcccttctgatgaattcttagcttctgtgacttgctgtgcagcccaatagagctttatagtttccttaagtccaatttcttgattatagaggttgcttcaacctagcagtttaaagtcaaagatttgagccagttgataaggatgtttccttgagcaagtaacaacctccaggtgaggatcggtgaaatgcaagtgatactagtgcttttcctggagggttggtgtgaggattaaatgagttaatgcatgtaaagcacctactctatgttgttcagcatatgttagctgttgtttcttttacagatgagaaaactgaggttggagaagtacagtgatttgtctgagattcagtattcagttaattatagacctggatctagaaactaaatcttctgattcctgatacagttgctgaaatgcccatcgtttaaagttaaaaaaaaattctttaaagttttgtctggtcaaatagctccccttctagccacactgctttgttgatatgttttcttaatttttcattcaaatgatttgtaatctgaagagtgttttagatttaataaacttttatagtttattatattctatatactggagacatagataatcaatttttgagtttttaaaaatctcctttctagagaaagatttagtgtgtaagttgaatgtgtctattaactattttttcctttatgattttggattctgagataagatggctacttgtactgtttctatcattttcattttgcaaatcagtttttgatgttcagaattaagaccaagagcagcagtttctctcattgcttagttctctaattaggtatgaaattaacagtaaagttggtcactgagcaattttaatatgacatttggttttataaatgttatgataagctcactttgattttagttcttaaatttaactttttaaaaccttttcttctcttgcagttgaaaacaatcctcgaacaggaaatcttggtgcactaattaaggtcttcctttctagaaccaaagaactaaaactttcagcagaatgtcagaagtaagctggctaattaaaccatgtttgctttatatttaacaatgtgaattttagttttcatttattgatggaaatggactgtggtcttttgaaaatctctgtgaaggaattattctcattattaagaaaaaaaggtagagaggttttaggttagtgtctaagtcactggggtgagattatagattcgggaatctgatttcagctttttagacaatctttagattatattctttaagaaggtgaataatgatgtaattatcgttaagaaggtaattcccctcccccccattatcactgctgctgctatctagtttaaatgatgacttagtctgagttttatttcattctacatctgttgcagttatttccgttatattctttacatcaatggaaggttaactttttatgcactgaagcatttttcaaaaccatgtttggatgtcagtctctgaaaagattaaaatattttgcattgtcttgcttataaacaaattacattgaatccaataaagtttttcttgggagttcatggtcattaatacaaataaaaagtattttaccgtgctgctggcaatgcctcgtcgaaaattttggttacatatttgcatatattctttttatgttaccacaattttttaaattttttggtagctttcttctcttttaatcgcatgtacgtggtatacctattaagaacaaagaacagtcattcctacagtcatcagtaaagatttttattaagtagattcactatgtaaagtacatggaatgaactatgaagtaaaacataatatcactggtacaatgaaataaatcatgagccattaaaagatatggacattatcctaatattaccaataggatggacaaaacggttgtcaaatcaggaagaaatcatgaactagaaataaactatggtgcttatgtttaaatattgattcttgtatgattttggtctttctagccacatcttcatttggcagacacacaatgctttgtttattatttgctgtttgctgaaagtgttcatctgtcagatgtcagaggaggaattacaacttcattttacttatgaagaaaaatctcctggcaattacagtaagtattgtttttaaagatgttctggatatatcatgtgtaacatttaaggataaaatttcaggaataaaagtatgattttgaaaattccagttatccttataattttcattttaaaatgaacttatactgtcattttttctttttctgtgttaatttaaatgagtgaagactcaagcgttttttgtttttgtttttcgttttaaataagaaagctggtggggttgaagctttcatttattttgactttcatgcatgtggatgaagaagaaagtaatataaaaaataaaactcacacaaatatgtatttctttcagaaaacagaggtgtcagttttaaatatcattgccaagtcaatatattattaagggagccaactagtcagattttatggtaaaggttactttcatagcgtgcagcaatagcttctgggtctgagtgtctttgggactacgacactttatcagaagtaacattttcaaggacagttttatgatgccaaagtgtctcatctttttctgaagatacagggaaagattacccttcacacaatctttcctttctgagggcaaggcagtgttgccccatagttttccgagttctgttttcaaaatagatctctgccctcatcaggctgacagcgtcacctgtgtgattcaaggtcatatgttaacatctcttgtgggaacaggtattgggagagaactttgagatgtgtatacttttaatggaggtctgtgtgctatgtggatttcatgcatatgtataataacactttcatatacctaggagtaatttttcactgtggtttcaactgtgttgctaaatacgtgtttttaaatgtcaaagtcaaatattgacaaagggaaacaaacgtataaaagagttactgttcatccaggtcaacatcacaatgtactgatttttcagtatatccatgtctatggggaatatttcttaaattctattatagaatttttatttatatttttatttttattctttttgagatggagtctcgctctgttgcccaggctggaatgcagtggtgcgatcttggctcactgcagcctctgcctcctgagttcaagcaattctcctgtctcagcctcctgagtagctgggactacaggtgcattccaccaagcccagctaatttttgtatttttagtagagatggggtttcagcatgttggccaggctgatcttgaactcctgacctcaagtgatccacccaccttggccttccaaagtgctgggattacaggcatgagccaccgtgcccggcctagaatttttaaaaacaatattatggggaagtagaaaagattctgtggaaagttaaccttttgtgcattcaagcatttcttaaaactatttttagatggcaaaaatcttatggaaattctggttatatcatttaaatgtattaaggtattatgttacattttgagcaaatgaaatgacatggtacaagaaaacaatagtttacaatactttcaactcaagtagcagagtgaccatgtgtatttatctcttctccctctgagaccccattacctgatggtagagcaattttctacacatactgttgagcaacttaggacagtcatttcatccttctttaggctccttatggcctctttcaagatcaggaaacggttttggagaaatagaatatgaatttctgttttactgcaatctttttcttcattcttatcctcagtgtatttccaaattagaaaaggacattcttcttgactcacactttgaaaatacgattttaccatcttctaacattttaacagcttttctgtgactggccaccttgatagccatttggcaggttcatgtccaaggagtctatcgcctttcatttctgtaaggtccgaatctcactaagttctgcaggttttgagaaaactgaaaggtggcaaacatcacagggcaggaaactactgcctcatagcaatgctgtgtgcaaggcatgcagaacatttagcaggcaagagctcttcattttctttggtcagaagtttgtagactaaatggaatttgctgcagtttacatatgccctgtccccaaataggcagatagatgagcagactctagtttgtgcttgagcaagatatcagcaatcttttgttttctgtttatgtggaaacatttttgttttcctctactgatactggacaaatatggttgagtgtatttaaattcaagtttcatccttgagagcatactgaattaaaaatatcacaattaagtttgtttcgtaagtgttctaaagtttctttccaacagatgacatagttggctggttgcagggaagggaaatcatatgttctacttttctttgaaagttattgtattagggttctctggagggacaggacaaatagcatagatgtatatatgaaggggagtttattaaggagtagtgactcacatgatcacaacgtgaagtgccacaataggccctgtgcaagctgaggagcaaggaagccagtttgagtcccaaaacctcaaaagtagggctgacagtgcagccttcagtctgtgtctgaaggcccaagagtccctggcaaaccactggtgtaagtccaagggtccaaaaacagaagaatctggagtccagtgtttgagggcaagaagcatccagcatgggagaaagatgaaggccaggagactcagcaagtctgttccttccatgttcttctgcctgctttattctatttgtcctggcagctgattagatggtgcccacccagattgagggtgggtatgcctctcccagtccactgactcaaacgttgatctcctttggcaacaccctcacagacacatccaggaacagtactttgcatccttcaatccgatcaagttgacactcgatattaaccatcacagtatctcaggtattattctacatttcatagttaaaatgtggataactttattattcttgaataaagcaagcatatcaattttagcagttttatttgctgtcatcttttattttcccttctgtcccagaagaccatttcatggaaggtcacttattgttttgtccagttttgagttagtatgaattactacctcattaactttgggggatagggggaaggggataggtactgaaattctctttgatgctgttaaaaaaatgttaaatttcagatactgtaccaagttataatttattaagaatagtttcctataaagggtgaataaaatgacaatgaatatgtgtgtgtgtatatatacatatatatatgtgtatatatgtttatatatatatatttttttcttctaaagcccaaggtaggtatagatatgtgtgtgtgtgtgtgtgtgtgtgtgtgtgtgtcttttcccctttcccgctttgtaactgtgagagccccaggtgtttaggggctgccccacgagtatttcccttggataaaaatgtttaccttgtcttctcaggggaaacaactctccagtttcactgtagatcagccattcctttcttggattctgtgctttctactctgaagtaattcctgttgaacttttgagattctgctctaaaaaagataggcagccaattttttttttttttgagacagtttcacttttgttgccctggttggagtgcaatggaacgatctcggctcactgcaacctccgcctcctgggttcaggtgattctcctacctcagcctcccaagtatctgggattagaggcatgtgccaccatgcccggttacttttgtatttttagtagagacaggggtttcaccatgttggtcaggctggtcttgaactcctgacctcatgtgatctgcccacctcggcctcccaaagtgctgggattacaggtgtgagccactgggcctggcctaggcagccaaattttattgaagctacctttcattaagctaccttggaaaagggagctgaggcacaggaagcaaactgaaccatcctaatatttttagagattgagcatttgtcatttcaccaaaatttatttcaataataaaagtccctttgactccacatttgattagtggtactggaaaaacaggtactgcttcctcttccccctaaactttcacaggcaaaatacattttctgtctctttctcagtcactaagtaggaaaggaacataagaccttctaagttgtttctgaatatagctagattttttgctggtcttgatcttcttttgggattgaccattatgttctctgactaccatataactgtatgttatagtatagacttaatcaaggattttgaggaagttaactaagttggtgtgtgagagatactgcagaattttggtattttgaatgttatatactttatttttttctaggagagaatatttgtgagaattatgtagaatctaattaatttaactattcccaaaccaccccatcatctttcacagttattgtttatcatttagcatgattttcagagcttgtgctttatacattgagtttgagtttcaagagatggatatgtttaatttactattttgatcattagccttctatattttttaaatatatactgatgtctgaagttagagcttttaattagaattgtgtcttgcgtgtgttagttttgttaatgctggccttcatgtttgtgatgccagtagtaccaaaaacatagttctgcttggtaagttgcaaaccttcccatgaagtgctagcagcaagaatggagtgaatgtttatcctcacagggcccaagagcatagcccactcaatacctgcaaacccagcactttgttttgtattatgtcctacaaaatgtgcatatttttactttatttaacgtgatattgtcagaggcatgggaaccagaacaactccatcttgaataggagctgggtaaattaagttgaaacctaccaggctatattcccagacagttaagacattctaagtcacagaatgagataggaagttggcacaaaataccagtcatgaagaccttgctgataaaacaagttgcagtgaaggagccagccaaaacccaccaaaaccaaaatggccacgagagtgacctctggtcatccttactgctacactcccaccagcgccatgacagtttacaaatgccatggcaatcttaagaagttaccctatatggtctaaaaaggggaggcatgaataatctaccccttgtttagcatatagtcaagaaataaccataaaaatgggcaactggcagccctggggactgctctgtctctggagtagccgttctttcattcctatactttcttaataaacttgctttcactttgcattgcggactagtcctgaattctttcttgcacgagatccaagaaccctgtcttggggtctggattgggacccctttcctgtaacatatttctctgtcctgtaacaatatcatttttattgtaatataaaattatttttcattatataccattaagtgaattgatgcattttagagatatactgtatttattttggggtccaaatctcagagtatccctgcaccccccacccttgtccaagcttgagaagcaaggttttttgttgtgcatcctaggtaacctaatgtaagggtagtgggagaatgacactttttcaaccataggccactttatcaagatggttatctcactgaaagagccatctctgtggtaatctctgtgattctgtctgcatactgacagaccttttctttctttttttttaatttgaacctatcattgtgaatatatgcttcctttatacagagttgacagttcaggattttatacatggttttttctttttcaggcagagtcttgccctgtcacctgggctggagtgcggtggtgcaatctcggctcactgcagcttccacctcccaggttcaagcaattctcctgtatcagcctcctgagtagctgggattacaggtgcctgccaccatgcctggctaatttttgtatttttttagtagagacggagttttgccatgttggccaggctggtcacgaactcctgacctcaggtgatctgcctgcctcggcctcccaaagtgctgggattacaggcatgtgccacctcacccggccctatacatgttctttagtgtttataattgagcctactcttggtccaccagcttaagtccaatgaatatcttttaagactaaaaactttctgtttttggcatatgtaattatttttaccttagtcttccatgttgttagtttgagatttctactttagccctttttatattttctgccaatttctttttacagttgataaaagagcaataaaattaaatgattacagagatactgttgaaagggggaaaaatggagcatcaccatgcagtagctgaagacatccatttatcagctgatatatgatatctgatttaggtatatgaaagagtggggtcgataatatacagtggtacaggttgtttgaaggtcgaatttacaaaagtagagggccatctgcaaacaattgagcaaagtcaactgaggcatcttaggtatgttggcttattccacatacagcatttttttctttattccaatccattgtaatactgctgtgatcacatggatattgctggcattttcagtgaagcagtctttatgagagtaatgtgactgtcagtaagctcttagtttgtaatctaaatttgtgaggattttgtatttgaacattttcccataggctatgtatgatgtggtagcagattgttagggagaatttgtattattatatgaggatagctcttccattagtccatgcgtttgagaatcagtcaaaggggacaaagccagccctaggcaaaactatgaagtaatacaaaattgtttccattttccttttgccttcaatgtgagtttttctttcctctggcttggtattataccccattcttgccaaggtaatactgatatttatttcacatttggcgtcttataaatccaatattttaaatccttaggggcctaaatctgctgtttgtttttggaaacgcttctcatggcttgtttccttgtgtatttgatgtcattgattgtattattattattattattttgagacagagtttctgtcactcaggctagagtgcagtggcacagtcacagctcactgaagcctcagcctcctgaatagctagggctacaggcacataccattaagcctggctaatttttaaagattatttttggtagagatggggtctcactatgttgcccaggctggtctcaaattcctggcctcaagcaatcctcctgccttggccttccaaagcactgggattataggcatgagccaccacacttagccttgtttgatcttatttgaggctccaaataagggagagatttgcatttgcttctaaagggatccagggcctgtaacacctgatgccatgttagcatcctgcagcaattcttgacttaatgtggagtctcaggttcaggccccattccttgccactgactgaggcttagtcagtgggcttcattctaactggcattcatcctcagggttacctatcttagcgtttgcttacttctcagtgttttactctggattcaagtccatttatttgctcgtaggttgttcttttggttatagggttggagtccttagaaatttgctttacattctgggaagcccatcaatgcactaaaaagtgttattttagccaaaaactagatgttttgtacaggagggcttattggagtaactactccaccatgctgcaatgatagtttctttttcttttattttggagacagagtcttgctctctttcccaggctggagtgcagtggcacgattttggctcactgcaacctccacctcctgggttcaagtggttctcctgccttagcctcccgagtagctgggaatcacaggcgcatgccaccatgtccagctgatttttatatttctagtagagatggggtttcaccatgttggccaggctggtcccaaaccctgacctcaagtgatctgccctccttggccttccaaagtgctgggattacaggtgtgagccactgaacccgcctatagtttctttacaattattttttgtttatttattttttaaatgagggaagaagcctttggagattgagaggctgaagataaaagcaacaaagtgggggtggtgggaaataaagctgaaaggaaggtccagggaagtaggaggtgctaggatgaagagcccagagagggagttagtcctgttttgttttgttttttttttttttctgagatggagtttcgctcttgtttccgaggctgaagtgcagtggtgcgaccttggctcactgcaacctccgcctcccaggttcatgcaattctcctgcctcagcctcccaagtagctaggattacaggcgtgggccaccatgcccagctgatttttgtatttttagtagagacgggggtttcaccgtgttggccaggctggtcttgaactcccgacctcaagtggtccgcccatctcggcctcccaaagtactgggattataggcgtgagccactgcgcccagcgttattcctgttttgaaagagattaccacctgtggcccagtgggcagctctgtgagcactgaggggagggaggcagcagatcagctgcccagacctggggcgagcaaggtgctaggcccaagacactgtatgacctgtgagtacagctttgtggagagtagaaaagggacagggactcgacaaagccaagcggaagcctggctttaatggcacttccatggcacaaaacagttcaatataaacttatttttaaaaaattattttgtgggacttattctcaagcatagtagattaaacatgcatgtttgctttctcctggaactccaataaaatatcagcaaagggacttctaaaaagtcatgaatttattagattgaagaagagaggggaacacaatgttaataacattttgaaagttggaaaatggagtaatgatgagcttcactgatctgtgaaagctgaaagctaaatggcttcaaggttggagaactccagaaaaaaagccagttcttactccagaaccctggaaagtcttaggaatcagaagtgccaggggtctctgaaggcattcaggcttggttggaagaagcagttctgtccaaggttctgtcccttcccatgtgttaggaggccaccccccttcccagtttaatactagagatctgttatccatagaggctgaacccagagagtctcctgaatgaactctcaggcaatggggaaggagggtggcctactgagacgagggctcagtggaaaggccacatatggaagggtaaggtatcttgactaggctgctagaatgctggcaccaggattttacccaccctattccctttcctgccagattagtggatactcttatagagaaaatgaaccaaaacggggaaaaggcttacatttcagcgtcccctagtgaagcagcccgaaaccctccagtgggaaccgccgtttggcaggctctgcctgtgcacaccgcgctttcagtcagcattggcctcacgctggcaggtcagtggagagccaaggattccaaacagtgaaggcagtggctgacttgtgagagatcaaaacgaaacaaaaaagtgatacaagataggaaatttgtggaagtatatttaaaatttgttaattaccccctgtctaacacaagcagtttcctttccattctccccagacttaaaacatttttgaaactctttctttggaatcaccttcaaaacctgtggcatgtttgttttgccaaactcggtggcggtgagtcctgtgaaaccagctttgtttttccagatggctcaggtgcttcggctgccacggcagcaggttctctgctctcttttctctgctggaactgggccctagagactggggcaggcggtaggtagctcaggaggtaaacccaaaattgtatagtatgtggttgggtggtttttgctttatttgtttaaataccaaatttaataatttaaccttattagttataggtaagcaatgcaaaaaacaaacccatatggaaaaatgtggcccagagaaaaaagaaagcatggacttattcctttaaaatattgacttgtaatatataagacttgtaatctgtatctgcagaaaaacaaaagtgcctctaggaattcctgaactgttctttggtcatataataggtgtgattgttttgtcatatttctgtctcttctctccctttctttcccttatgttatcagtggaacaaaatcaattaaacttttctataggcacattttataatcaaacctggtagagtatattatcttttagggtaattagaaacatttctgtttgaccaaaataatagcagtcaaccagaattattactgatctgattggaatggtacaggacacaagcttataaatactgtagtgcactgaaatgcagatcacttttctttttagaagagtccttttgcctttcctctttatgattaacctacaagagacatttttggttttgctaattagaagtttaaatctaatattttagaataacttcaatgttagtttcactattaaagtggcaaaaacatagactctaccgtgagtcttttattttctgaatataagtttttaataaatataatttaattatgtgtcttccattttaaagaagccaattttattctgaacttctaaggtactcttttaacctatttttggagtacagccctgttcgattaagtttttagtacttgtatttggcacagtgtaattttgggcagcattaaaaaactggcagttcaaccttctgaacgcaaagaaaacaaagacaaaaactctgtcttttaacatttcttttaatgactgtatgtattctgatttaaatccatatgtttcatttttctggttgctttgttttctaatgatcagtgagtgctttttaaaaataatttttttactgtcttcccttcccctcctactgtgttggaaggcatttgattaggacagtattgtactgttctctgcttctctccctaaggacaaaacaacagtgctgtctcactcagcacatggtgctgaatggatgctgaatagaatgaactaacagggactgcagcttaattttgggtatagattattagaaccttaagggaccctagatatcatctcgcttgtctacttcttcccctggtgaagttcttagggactagagcagtggggctttagagtgagaaaactccagggatagggctgggattttagtgaccttgttctgcacaatacggatgataatagcttatatttattcattgttttagattatttgtacattggattttgaaggagtcaagaacttctagtatgtgttgatgaatacatagtgtgtcatctttatgtataaactaatatgtagtacttcagatgtctccctcctaaccgggcccatagtacttggggttttgtgtttacagtgttcagtaaaacatgaattggttgaatattttcccccaactttgtgtagaaacatatctttaaaaataatttaaaggatattttccttttaatttttttccttgagagtatagatttgagttccaatctggtttctgccccttactctaattaaactaacctatctgagccttgatgtcttcatctgtaaaatgatgatcataatcattaactattcatcaagagttactgtcaggattaacgttaacatgacattgagtataaagtgctcatcacaatgcctgtcaaagggtagagtacttggtaaatgtttgctgttaatatgatcttatagaaactaagacttaaaatattaaaatatttgtctggacctattgtggtaatttaaaactctttaagggagaactcttgtttgtttgtttgttttaagagatagggtcttggtatgttgcccaagctggcctccaactcctgggctcaagagatcctcctgcctcagcctcctgagtagctggtgctatagcaggtgccactgcaccaagcattgagagagaactcttaggagagaaatgttctttcttagagaactctaagttataaaactttacaatacagtaaacacactgaatctttgcaaagacctttgctcaaagaacctcagtttattttgtcattgacctgcaaatttcaagaacttttaagattctttttactgtatgaaatgcttgaatgtgttactatactttttgtaggtgagtttatatttattttttggaactaaggaagatatttggccttataagaaagctaaggtgatataagtgctagttgggaaataatgcaatatgaatggcttgcttgatgtcaaacctagtaagcagtcaaatcttgtcaatcttcacttaaaatacaattatttacttctagattagctgagaaacaagaatttagaattctgaggaattttttttttagtgaacggaagtcttaagatatttcagctggaaattgcttattgtcttttgttagagctttggccttgaaatattacattttacttctatgaaatatgtttatcatcatcttcattattttattagattggtaacaaagctgtgtgtatactccttaattgacccaactgtaaatttggccgaggttgtgatttgagtggcacatggaattgaatagagaatccttgtcatcattttaagatgtaaaaattaggtgtttttatacccctggaagttaaaaaatcaaatcaggcaccatctgtggttcctgagtgcttggtctctcaccttccgtaattaaaaaactgtgctggctgcttggctgaacagggatgttattaaactggcatttggtctgaaatgtttcttagggaatcactgagtgattttaagtgttctttcttgggcctgggacattgcatcctgtagaatgagttaaggagtgaccatttagcaaacgtacattgagtatatattacataccaacaaatcaacttgttggagtaggttgttaacttgagttatgttggacagccttggcaatgagagggattttagttagatctggtaactaatcatgcagtcccagagacaagtgtgacttactcttttatttttttttcttcactaataatagagccaagcccgatgtttcttggagtgagatttaatttggttgttgaacttgagtcttgctgtgtatcctttttagcatcgattgctgtgttcagcatgatttaatattctttttaagatttgtacttacctctcacggggttactgtgccagttctttgtggcaaagcaggatgaaatttctttataatttctgaatgctaggtgatattgtagcctagaaaagaaattgctaaactttttttttttgagactccaagtgctttgatgctttgcaattaactgctggattttttctgagatgcttgggctcagttcagcaaattgtattgagtacatactatgtgcaagctctttgtgagtcatcatcctctagaagtatagagtccagtaggggcctgcctgcttgtagacaaaaaatgatggcataatgtaaccaacatatgcaacgcaagaggcatgcacaaggcatagatactttatagattattcagggtgagacaagggagtgggtttcatggaggatatgaaactgaggatggttcagatggatacagatgggctttttaaaaactaggtttttattgttggaggctattccaggcagagggaatgttactgaggtgtgaaatggcatgtagtggatagcttggcattgctggaatatacactgcagtactggaggaagataaatgtagaaagggatgcaggacctatatctccaagagtctggcatgctgtactttggagcatggaatttttctgatatatattaatcagcttaaagtaattgaaaagatctaagccaggagagtgaaaggatggagtttagttagctctgtctgattgcaatctggagtttggattgcagaggagtaaaattggaactacaatactaactagttatgaaggttaaaggagtccaggagtcagttttctttctttctttcttttttttttttgagacacagtcttgttttgtcacccaggctggagtgctgtggcgcgacctcagttcactgcaacctcttcctcccgggttcaagcaattctcctgtctctgcctcctgagtagctgggaccacaggcgtgcgccaccatgctggactaatttttgtatttttattagaggtggggtttcaccatgttggccaggctggtctcgaactcctgacctcaggtgatctgcctgccttggcctcacaaaatgctgggattataggtgtgagccaccacacccagcccaggagtgagttttaatttagtaaacttgtttagctgcactgtggtgatgagataatgaacaaaaaagcatgacaatggtggaactctggggaacatgccaatagttgaaacgtattttgaggaagcagacactgggaagaaatagaaaaagaagttggttaaaaataaagtattataagaactgagaaaagaaagaatttcatgaaggagtaggtgtcagtaatgtccaagaccagaagtcacatgagatactgactgactttgggaatttggaggtcacttacctgtagtagtttgggataggggaacatttccattggaatggtaatttgcatcctgccgttgccacttatttattctgtgacttgggaaagcccttttacctttgactcattgtctgtaaagaggaggttggcctctttaatggggttcagtctatgatccgtggagtgccagaggttcataaaaggtaccttcaggccctcccatcaagaaatcaagggtaaggccagatatttgttggggagggagggataaaagtcctctacccctgcttcaaacaaagcagtgagagcagcttgatttttatctgtctcatatatttggctttaatgtaagatttcattgaaagaaacacagtgcagtataagaaatctgacaactactggcgtacaggagcctaaagtaccttcaagctttaaaagctgtattattaacagcaggtgttgaaaggtcctatgctagatgaagatcatcatagatgctaacctattcatgatttggattttattcagaggtcaacattaatatctgagtttatataatgataactgtttgtattctcattaggaatgaaaatgtaacttctgaacaactgtattctactgtgtactttgttaaaaaaaaatctttttatgtgtcttaccaggttctgactcagaagatcttttggaagaattgctgtgctgtttgatgcagttgatcactgatattccactcttgtaagttctggctaggccaggatttgttttatcttctttgtatatggcagataatcattgatcatgttgagaagtttgtgggtccttgtatagaacttatatgtgtgccttttaaggattctatatccacagagttcttttctctctacctaatatttagactgactattcattgtcaaaacaaaaatgttacgttgttaaggggaaaacagtgaaactatattaagaatatggtaggcacagaattaatctctgtattaagagatcttatagatctttggaaacaagattttaagagagaagcagtttgaatctacttcatattgtggtagacacagtgagttgagttctccttatcttcctgacttcctgattgtatttccagcctcttttgaagccaggttttcgtttccagccttctttgaagctaggcatagtcagtgagatgtaggggaaggtcctccaatgaaacctctgggtaaagctctctaaaaggaactgattgagtcagctaggaggcacatctttttgatcttaacagccctttctcctgctgtctggaatgtggatagtcttttgagttgcatagccttcttggcaccatgaaccaagagacttacagaaaattctgttttgatgtcattgagctgctgaaccaaagccaacaactaccagtaccaccttttttcatcctggacttctcatgtgacagaaatagacccttatttgttaacactgctgtaactgggcttctgtcactgcagctcaatgcaattcctttgtgattcgaaatgttcatctcatttgttgcttttaaaaatttaaagtagagacagggcctcactatgttggccaggttggtctcgaactcccagcttcaagtgatcctcccacctcagcctcctaaagtgcctggattacaggtgtgagccaccgtgcctggcctcatttgttacttttaaagcagtgattctccacctttaaaaaaaagtattggccaggtgcagtgtctcacgcctgtaatcccagcactttgggagcctgaggcaggtgtattgtttggatgcaggagttggagaccagcctgggcaatatagtgagaccctgtctctacttaaaaaaaaaaaaaaaaaaattaggccggatgcagtggcttatgcctgtaatctcagcattttggaaggccaaggtgggcagttcatgaggtcaggagttcacgaccagcctggccaacatggtgaaaccccgtttctactaaaaatacaaaaactagctgggcgtggtggcgcatgcctgtaatcccagctactcaggaggctgatgcaggagaatcgtttggaccaaggtcgggaggcagaggttgcagtgagccgagatcacgccactgcactccagcctgggctacagagcgagactacgtcacaaaaaaaataaaaaattaaaaaattaaaaaaatatattgtccccctgagaagccttgtttgacatttctttgataattgcctctcccacttaatgaaatttgaatccccagacacactgaatatctgtttatgtcctgcagccctttggaggaccgcaaaccattattattgtatctatgaagatttttacttacctctgtggaaccaatttacatctcctgttgaaaatgcatatgtacaaggaattatttttgaaataaaaaagtagattttaatgtttctcatcacagaatctcagtctacatggagatataattggaaatgtgctatttgtctatggccccaaaaggaaagacaggtatttgtgagaaaataggctccaggctgctgtcgtacatgaatgcagcatctagaattttaatatagatttcgaagtgagaaccaccaacccctgtcgtgatatggcctggtggtatgcacccaggaaagtagggctgaggcagctgaagagtcattgcctagggaaggaaatgggacaatttcccattcaaccggagctcctgcagcagacacttgcatgacatcctttctccccttccattctaacagaactccagtattgtttagagtggtgctgtgtgcccagattagtttttcagacactttggcggttccatgtgaccatgtgacatagtttgggtcaagtatatgtgagcagaagtcatgaacttgcagagcatatccactctagccttttgctcattgccttctcttccttcctggaatgtggaggcaatgcttgggctgtcttgaaactatgttaatgagcattgcatgcaaagactagtgtcctgggagcatgggacattggtgacaatatgaaactattacattggccctggatcccatatctttgggtttcctcttacatgagaaaaatagatacctatcttgcttaggccactgtggttaggtttcttttacatgtggtcagatcagggaagggaaacacatatactgtgtactgtttctttgtcatggtatgtggagtgcttcatgtgttcctgatgtaattttaaaagtagcaccacctgcaattttttttctttttttttttgagatggatcttactctgtcacccaggctagagtgcagtggcgtgatctcagctcactgcaacctccgcctcctgggttgaagcgattctcctgcctcagcctcctgagtagctgggattacagacgagcgccaccacacccggctaatttttgtatttttagtagagatagggtttcaccatgttggttaggctggtcttgaactcctgacctgtgatctgcccgcctcggcctcccaaagttctgggattacaggcatgagccaccacgctcagccctaaatatattttttttttatataacacaataccaggaatttagtatatatcttaaatgagtacacgctttttttttttttttgcctttattgataaaatgttttggtgacattcagggtgatggaaacagtaaatacctttagatagtaaattggctccaaacacaatgaatagagcagccatttaaacactcttgaggagcaagccgattgtgttgtaatatatcaaacatttcagtgttttaatgtgtttataccttttaaattagctgaaaatgcacagctagccagttgtctcctattatgtacactcagctttaaccagctgctgaaacaatttctgatgatttaatgttcttggaactccatcctacaagaaggtttgtcttggtaacagtttccatgtgaaaccaaactactctttaaatgtttcatttcctctaactgtagtgcagtatttatggatcagtgtataatttaagaggaaataggaatatatgcaaaccacgaatgctctcacacctgaacatcatcagaagtgctataaacgtttcacatttcacattggtaattcatcctgtgctgcattagcaggtaaataacaagatgaaatgaattttaatggccactgagggtaattcaaactagcgtaaatgtttcttatgagacttttaaaatcattctgttaatattgagagcaaagggtttaccacggacacatacatgtgtatgctatatatttatttagagatctgtaaactaaaatgtaaatgataccttattataaagagaataggatcagtggcatacttgaaataaactcccagaagttcattacagtgatctttgtaggagttcatttgtaatgaagattcacttttaagtagttagtggctactgtttctcagacactttggatttcttgataaaatattaattcacggaggtactaatcttcattaaaattgttcatctttcaggagtccttccttaactccatagctctcagcatttatatatttaaaataaagattaagtcatgcacgggcttgacatttttcagtgtgtattggatcgatcccactagaatttaaataaatcggccaaaagcaaatccttgcctttgatttttataccttccctgtgtctcagtgaagtaaacaggaaagtaataaagataaaggtattttcctcaagacactaatatggagtgttctaacagaaagaacgtgggtaggtaagccagaggtaaaagcccagcgctcggaacttgtgacactgtctgggttcttgtagtgttactataagggctgaatgagacttgtgggaaccaaccgagtggtggagtcaggtgtggccatagccgcagaagcagtgatgccgtatagacccatccttgtattttggggctgcttgtgatgctgttttgttaagaaatggaagttattttgaggactcaaattagatttttttcccttgtctttgtttttgttgctgtcatttttcagcaaatctgtggctgttagttgtacatgaggatgtcagtgtcaagcacaggccccactccttctcactagtgccaccactctgggcaggtctgctcagagtaggcctctttctattggcctcagacccaaaatacagcctctttctctgggatccatttctgtggtctttcttatgaacctgtgaactcattgaggactgtttaatttttagtctggccctgatttgcagatttgtcaattataatttaatctaagaaaactttttgtagtttttttcgtaaggtatagattgataaagatgagagtttcataattaattgctttcactgcctttttcagggagtgtgtatctatttgtgtactgtgacttgtcgagtacaggggatatctgatgtcatctgctaaccctcactggtggtcttgctaatgtggagcatgccagtccatgctgtgtctagggcctttgccttctttccttctacagtttgtcttcctttagatatttgcatggctcacgttctgaccaccttcaagctttcatctgcttcacgttttgtttctttagaaatggccaccctgactaccctatagagtagctttgaccacctgaaaatagctgccctctcattctgtgtcttttttcatgtgttatttatttacttatttatttatttttttgagatgggattcccactctgtcacccagcctggagggcagtggcacaatcatggctcagtatagcctcaactgcccaggctcaagcaattctcccatctcagactcttgagtatctggggccacaggtgtgtgccaccatgcctggctaatttttaaaattatttttagagatgaggtcttgctgtgttgcccaggctggccttgaattctgggctcaagcaaccctcctgccttggcctcctaaagtgctgggattacaggcaagagccaccacacctggcctgttttttgtcttaacacttttcactactcttcatattacctgttacctctcttgctcatattttcccaataaaactagaatgaaacctccatgaaaacaagggctcttgtggcagcatttggtttgctcactgctgctgcatccatgatattcaggttagcttggcacatggtagactcaaatatttctttactgagtaaattagtaagggtctaacctgttcactgtgcttaaagcattttgtttgtttctcagcatctagtctatatggaaacagtattgtgctaaggcatattccactgcaagtgtaatggctcatttgtagttggcacattgtaacaacagggtgtcttactgacattggtagtagaaaggggctactggaagctgaaacactgagaaataacacctgagaatgtttaagggactagtagattaattagttataaatgctgagtattctggggccgtttagtttagggacgatgggctttatatctcagtagtccctagattattcttagtataataatttctttttaattcaggtcatcctcaaaaacatattgtgaatatactatgtgtgtacagtggagtagaccctgaacataaaaaggtgtgactcttgaagagcttagaggtagatagacaaaaagataccccgatgagaagaacattggtagatgccacagtcatttggagttgaacagattagcactggctaaatcattaaagaggcagaaaagaactggatagggacttcttaggtatgaataatgtatttggaaaatcacaagcacattaggttgagcagagggtttgtggaatattagggataaagaagcaatgttgatgtagcaaagactcaaatgttagaggactaaagatttgattatttttagggttctctgtttattgagatataaaaaagaatataattattagaaatatttttctaaaatccattttggaaatatttgagtgtgaaactgagaatcttatttataaaattcagcttatagcattttaaaaatgtaataacattatataagatgcacatttattggatccatagactaatagtactgggttagatgttctactgtggaaatttgagtactgaaaacatttggtagtaacagtgagtagatggttcaagaacctaaagagtcataaatggtttctttatggagtctccaagtcgttggaagagagtgaaggtacaggagagacccatggttggcaacgaagggcctagctattgggaaaatgcctttctacagccctgcatgttgatgctaaaatacttctttgaatctagccgtaaggtgggtggaggagtgagggtagggttggggggtgactacagcaagtcagtattttaagttttaggtgttgcaaggcaaacatccagtatagctttctgaatgaattaggcatttaaggcatcgattgaatcaaagaatcaaagattgtagtattttcagataccaagacagtattacgtattaagtttacagtagctttttagcttgaaaattgatgtctggtgccttcagagaatttttcctggtaaaaaaccaagattgttactgaatgctgctgttaattttgtttactttattaatacatgtatagcaaaataggaataaagtgatttgacattaataactgcaaattttaattctcccaacaaacaattgatttttttctttttaattttttctgacttataacttacttctttacagagtaatttcttttcagacataatccagattatattacatttgaatattttctggtagtcattgatgctgaattttaagtggtcatatatgtatgcacatggtttggagacaaaatcacattgcacagaggcttataatgagaacaaatgttatttgtctcatccctttttaaatgtttcctcctgagagacaaactttctaaattctcacctgttctagtggtttatataaacctttaccttcatttaaccttttatatttctaaataatataccattattttgaaaaaataagtctttatatttatttttttacatttagttttgagagtaattttaggttcaccacaaaattgagcagaaagtacagaattaaaaagaaaaaaaattagttgtttgttgggagaattaaaatttgcagttattaatgtcaagccacccccacacacatatagccttctgcaccgtcagtgtccctcagcagaggaatacatttgttataattaataaacctgcattggcactggattatcacccaaatatagtttacttcagtgttccctgtaggtgtaggtgtttatcttctatgggattagacaaatgcatgatgaaatgtatctatcagtgtatcatattgatcaatatatctattgtatctgtcaatgtgttgatcagtgtatcaattgtatctgtcaattgtatctatcagtgtatcaatgtatcatctatctatgtatcatctatctatcaatgtacctatcaattattgatagatacatctgtctatacattgatgtctatctatgatatctatgatagatatcaatgcatatctattgatatctatatctattgatatctatacattgatagatacatctatcaatgtatctataagtttattgatcagtgtatcaattgtatctatcaatgtatcaatgtgttgatcaatgtatctatcattgtcatgtacagagtagatcaaaggatgatggttaaagtatgtttaattttgtaagaaatttatattctatgggattagacaaatgcatgatgaaatgtatctatcattgtcatatcatacagagtagatcaaaggatgatggttaaaatatgtttaattttgtaagaaatttatattctatgggattagacaaatgcatgatgaaatgtatctatcattgtcatatcatacagagtagatgaatgaatgatggttaaagtatgtttaattttgtaagaaactgcttaactgtcttccaaaatgcctgtaccagttttgccattcccaccagtaatgaatgagagttcctattgctccacatccttgtcagcgtttggtggtgttagtgttttaaattttggcatttgaatagatgtgtagtggtatctcattgttttaatttgcagttccctaatgacatatgatgttgagcatctcttcatatgcttgtgccatctgtgtatcttttttgatgatatatctgttagtctttggtccactttttaattgggttgtgttcttgctgagttttgagagttctttgtatattttagataacaatccattatcagatatgtcttctgcaagtgttttctcccagcctgtggcatttcttctcattctcttcacagtgtctttcacagaatagaaatttttaattttaatgaggcccttgctctcagttatttttttgatggatcatgtctttcacagagtaggaaactttaaattttaaaattttaatcttcctatcaataatttctttcatggattgtgcctttggtgttgtatccaaaaagtcatcaccatacccaaggtcatttggattttctcctattttatcgttttagagttttatagttttgcatttcatatttagatctgtcttttttttgcatgtggatatccagttgtttcagcatctggttgaagagactacctttccccattatactgtctttgcttttttgtcaaagaccaattaactatatgtgggtctgtttctgagtgctcagttctgttctgttgatctatttattcttttgccagtgtcatgctgtcttgattactgtagccttgtagtaggtcttgaaggataattccagtccttttagtttgttctgctgtttcaattttgtgttgatatttataggccttttgcttttctgtataactttagaaccagtttgttgtgttactacaagttactaccaagtaacttgcaggtgttgtgatttgaattgtgttgcatctgtagatcacattaagaggaatcttgacaatattgagtctttctatccatgaatatagaatatctttctatttatttagttatttgatttctttcatcaaagttttatggttttgctcatacagcttttatacatattttgttagatttatatccaagtgttttattttcttggttcttaatgtaaatgtataccacttttttgattcattaaattatttattgacgtctgctcagatgattatctccttctacttgcaccttttcccttgctatattctattatatttaaattatcatttttagtttttctgtgtaatatatgtctttattccttcaaatataggcagtaacacttgactttccctttgtaaattaaagatactacttcccacacccttcattcagttctctttcttttctcttcttacttgtattatctgtactttaatatctacttattttaccccaggatgacaagtttacttaagtatattctttgtaggaagtacacaaaaggaagccaaagagcagggattagttgggttcaataaaaataatgagaagacagaactctccgtctcttaaagttttacgatgtattttaattgttttaaaatattactaatttctagatcagaagacatctaggtaaatcttgtaacatgattggagctaagttaggggatagataatctaaatgggagaagtgacttggaaatgtgtatattttctttgagtatatttattgttttgagaatttactttaaatcggctaatgaaactactctatgaagacctgactagggaggaatttggaaacttttttgtttctacattttggacctattttactccctcccaaaaatctgtcaggatgacagagtatcagaatttacagagaaagcaatatgtgtacttgtaatttgcagtagatatattgtatttcaataaagagtattgaaaagctttaaaaaaaaatcagaccctcccagtaatgtacttaggcacagggagagtttaataaagtaaatcactagatactgtcagttatttgggcatcaaactttgctaaataatccatagttgattccttaagagtcagcttcaactacaaaaatccactccagtatcacgggaggttttattttattttaaaagttaggtttattgatgtataatttacatttagcaaaattcatcttttctattgttcagttctatgagttttgacaaatgcatacagttacacacactgaaattataatgtagaacaattcaattacatccctctcaagttccctagtttcccttgtagtcagtctgtatcccaactcctcgtccctggcaaccacttggcaagaagtacagcgtgatctactttcccatgtaagtttttgtttttcttggaatttaatggcatttcttagctttttgtgttttttcctttattttagcttcacttttaaaaataaagctttattgagatagcattcatatgctacaaaattcagctttctaacttctacaattaattgattttagtatattcacaaaattgtacaaccatcaccattatctaataccggaacattttcagcaccccaggcagaagccatgtgcccattagcagtcactcttcatttctcagcccctagcaaaaccgacctactttgtgtttctatgggatttggctattctggacatttcatacaaattgtatcgtatcacatatggtcttttgtgtttgcattgttttacttagtatgttttcaaggttcattctagttatagcatggatcagtacttcattctttttttattattttagcctcatttttgaaagttctacgtgtagtcttgggactaccctcattgacaccatcagtcctctagcttcaatctagactggttgctttctagggctatcacatagctgtgtcatctgggattcctcttcactattttcttgggtggcctccatagttgcctgatattctttaaagccatttttggtttatttcctcagttttcatgtagcacattctcatgtagcttttgaagaaagtattagtccttacttgtctatatttgtatgtatttgtcttgtatgtctacctttgaatgataggtaggctagttatgagtttctgataatcagtattccctagagttttgaagatattccattattgtctaataatattattagtgttgttagagggaattctgatgccatctgattatcattgctctgtatggtttttttttttcttttcctcggtggaagattttagaatcttgggtttgtctttagaattctgaaatatggtgatgtgttagtgtggctgatattttttcattgatggaactgcttattagtcagtaaatatttgttcttcaactatgggcagttttttgtgttattcaatatttctttgtgcatttcttccctctttttaaatgtaatttttatttgtttatttatttagagacagagtctcgctctgttgcccagactggagtgcagtggcacaatcttgactcattgcaacctccacctcccgggttcaagcgatttccggctaatttttatatttttagtagagccagggtttcaccatgttggccaggctggtcttgagctcctgacctcaagtgttctgccctcttcagcctcccaaagtgctaggattacaggcgagagccaccgtacccggcccttccctctttttttaagtctctctaaaactcatgttcaagtcagatactggactttgtagatttaacctctcttatctcaactttttaagtctctctaaaactcatgttcaagtcagatactggactttgtagatttaacctctcttatctcaactttttacatcttttaaaaaaattctaacttgttggaaatttgtttgatttttagtttttgacctccctcatcaaaatttctgtactaaaatacttatttttaataggtaatatgtgtgcatggaaaaaatcagacggtatgaaagggaatataataagtcatcttctcactttggacccttactgtctaatcttctattccctctcccattcatagcataccgcataaaaagtgtttcttgtttttttttttttttctttttttttctttttttcttgagacggagtctcaccctgtcacccagggtggagtgcaatggtgagatcttggctcactgcaacctccgcctcccaggtttaaatgattctcctgcctcagcctcccaggtagctggaattacaggcgcccgccaccatgctcagtttagttttgtatttttagtagagatggggtttcaccaagttggccaggctggtctcaaactcctgacctcgtgatccgcccaccttggcctcccaaagtgctgggattacagacgtaagccactgcgctcagccaaaagtgtttttaaataaaaatgataccagccagacagactattctgtaagttgcttttatcacttttaacttgatttttcccaatcagtagctatagatcaactttgattttttatagctatgtatggattgtctgaatatatcataatttaatcagtatcttatgaaaatttagttcatttccagtcttttactattataaacaacactccaatgaatattcatgtacataaattcacttcatatatacagatatagccatcatatgtattttagagttggcattaattgtgcacattttaagttttgataaagatgtgataaatttggtaacaatttattccctaaaaagattataccaattatagtcccaccaaaagcctctagtagagccttgcaaacattgtacattataaaattttttgtaagttaaagattgaagtcatactgtgatccttttttaaatttttttgagacagggtctctgtcacccaggttggagtacagtggtgcgatcacggctcactgcaagctcgaattcctgggctcaagcaagccttcctcctccacttccctagtagctgggactacaggtgtgtgccaccatgcccagctaatttttaaaatttttagtagagatgaggtcttgctatgttacccaggctggtctcaaacttctggcctcaagcaatctttctgcctttgcctcccaaagttttgggatgacagattgagtcacggcgcctagttatattgtgattcttatgtgcatttgctcattgtaagtgaagttgaatatctcttaatatttttaaaagccatttctaacatttgatgaaattttacaattatttttagttccggagagttctttttctctgattattccatgttttatgagtgcaacattttgagttgacctaattgcactttggacatgtacttacccaccataaattctatacttgttacaattttggaatatttgctttatcattatatgtccatcttttcaatctgtcagtctatcttaatttttgtttttaagaatatttttaataactttttttgtgttgaactttaatttatttcaagaaaatttatggctatattttaaatatttgatgcattttttgcatatacagtatagtatttaagttaataaaagttcagtttttaatatttatggttttatgttttgtttgtttgtttgttttttgagacagtctcactctgtcacccaggcgggagtgcactggcacgatcttggctcactgcaacctccgcctcccaggttcaagcgattctcatgcctcagcctcaccagtagctgggattacaggcgcccaccaccatgctcggctagtttttatatttttagtagagacgggttttcaccatgttggccagcctggtcttgaactgctgtgctcaagtcatctgcccacttcggcctcccaaagtgctgagattataggcgtgagccactgcatctggtgtggttttttttttttttttggtgaggagtctcactctgttacccggctggagtgcaatggcgcgatcatggctcactgcaatctccacctcccgggttcgagtgattctcctgcctcagcctcccgagtagctgggattacaggtgtgcaccaccatgcccagctaatttttgtatttttagtagagacggggtttcaccatgttggccaggatgacctctatgtcttgacctcaggtaatccactcgccttggcctcccaaagtgctgggattacaggcgtgagccaccgcacttggcccatttttttttttttataaatcataaaaaaagtaatggatattttaatttgtgtgatccatccctttagtttatatatgatgaagttgataggtaatgtggtcgataacggtactgagtggcagttctgagactaaaatccacatttcttgaatcccaaatgccaagcactgtttcttctagtgttaagacttttataaatgaggagtattaccatgtctttgatttgttaatttttaaaactggccattatactaacatacttttgttgataatatctgtactatagcatattattttttagtctttccccatatttgactcctagaatctccatgttggcatgcattgatatttctaaattttggtctcaatcctttgaacttgtcagttgtttttattaaacttatgttccatttacagtaccatcaggtttcttatccaatagtaagtaaaaggaggatgtttttttcctctgtattcgttgactgctcttagccaacactaacacccatttcatgaagtcttttgtctttatccaagtgttccactgtgccctagcagtgcagtgcagggtcatggcgcctgtctctttttcttcacatgaaattaataacttgctccagcagtagtttgttctaggacatttccagagcagatggtggaaagttcttgggataatatggcagccaaagcagtattttggctttttaaggttgactttgttttggtgattgtgtaatgaaaatcttctgacattaaaacaagaaagatctgttgaattaaaacatttttcatcttctaaaaaccaccacactcagcatggtagaattttggtttctttcaagtattggcctctctggctctttttcctgattatttggcacttaagatagccaaattaatatatttttaattttgtcttcacagaaatgtaacattgcttttgaattcctttttaagagcattatagaaagttacgggaggaaatgccattagaggtcctcttgcacagtgtacttatttacaaataagaaaactgagacgcagagaagttatttgttgaggttaacagagcgagttaatagatgcttagaagcaggccctgactttcttcatttcgaatcggcgactcctgcagcatatactgcttgtgattagggtaacttcgtttttttctttgcttttatttcaatatgttatattttaatgaatagaagttcagtttttaatatttatggcagtcttctgtttttagttattaacttaatttttatatagatgatgcatttatattattcaaaaatccaacacataaaagtatgcatgaacaatctccctctcatccttgtctcccatctccctagtccttccattggcctccatagttaactgctattcttagtttcttacttgcccttataatttttcacaaatatagagatgacctacaacttaatgataatttgacttatgattttttgaatttacgattatgtgaaagcgataggcattcagtagaaactgtacttcaagtacctatacaactattttatttttcactttcagtacagtgttcaataaattacatgaaatattcaacactttattataaagtaggctttgtgttagatgactttgcccaactgtaggcttatttaagtattcatgcatgtttaaggtaagctaagctaagttataatataataggttagggtatttaaatgcatttttggcttttgatactttcaacttacagtagatttattgagacataactccattattagtcaaagagcatctgtatattcagttatgaatatagattcttatttcaccttgcttccacataaaaggcaggaaattctacatattgttttgaactttattctttttctagttaacattctatcctggcagttgttgtacactatatagaactttctcatttttattttttaaataacaacttcattgaggtatattttaaatactaaaattttcaccctttaaaaatatacagttcagtggtttgcagtatgttcacaaagttgtgaaaccaacaccactatctaattctagaacattttcattatccaaagagaaactgtgcacccatttgctaatgggcctgactacttcaggcctcatttatccctctcttctgcccctagtaaccactcatctgccttctgtctatgcatttccctattctggatattttatgcaagtgaaatcatacaatatatggcttttgtatctggcatttactttgtataatgtgttcagagttcattcatgttatataatatgtaccagtatttcattcttttttatgctgaaaagtatcccattgtctgtatataccacattttgcttattcaccagttgatatgcattgggtttatttttactttttggccattatgagtaatgctgctttgagcatcaatgtacaagattttgtgtagaaacgttttcagttcttctggctatgcatctaggaatggaattgctaagtgatatggtaactctgtatttaactttttgagttaactgccaaacttttccacagcagtttcaccactttaccttcctgccagccatgaaagagggtttcagtttctccacagcctttctcactcttcttcaaaagctatataatgttctgttgtagatcagtgtcaaaatatatttaatcatgcccttattgatggacattgttaatttgtttttgctcatatcctttgctcaggttgtattgccgcctctgttgtatctttctaaaaccctttctgtgttagaatgtaaatatttttttcagtttgcctgttgacttacttgcttataggatatttttgtttttatcatgatgactttttaacaattttgaataatttaaatttatccatcttttatagcttttaggcttaaggatctataagctgatttagttttacctttttaaacctcatctcttactactcttcttcttgcagattctattctagccctactggcctctttgttgttccttaaaggtactaggtgtattcctaccttagggactgcatgtggtactaggtgtattcctaccttagggactgcgtgtgctgggccctctacttggaagacacttcccttgccaccttgcttctttcaagtctttgcttaaatgtcaagtccttgttgaggtcttcttatttaaaattgtaacacacctgtgataggttgtcagtagtcccccaaatttatcttctttatttagagtttagctggacaacggctgtccaggtagagatgccatttatcaggattccctgcagctagatatggatgtaccagaagaagagatatatgcttttacattaaaaaaaaagaaatgacttgccttggagtgcattttttcccccttctctttggtgggaaattataacaactggcacaaactttgaagcacatgcaaagggtagtagagcttccctcccagcatgggccttgtgtattcttatcaagtggagcctacctgatctggattattttctggattatgatatggcagagaaattaactttgatcctgttttaaatacttgaactttagacctctttgtcacagcagcttagcctgttacttaaccttctaccctaacctggcactcttggtcctacctttatacccttacttttttcatagcacttatcttttaatttaatgtataacatatttatttatctgcccctctagatttaagctctgtgaagtttgtcttatagtagatacccaatgaatgattggaaagaccttcactaaagcatgttataaaggaattcttccatttctttttagatttaaacctttgatatatttgggatttatttttgtatagagtctgtggtatggattcaggtctttttttttttccccaaaaggttatacagttgtcctactatatgtattaatgtccttttagaatgttactaatgaagtcctattactaacttacataaaaatgatttaaaaataagaaatgtctactcttcttcctgatagatttctcacgggagagataactgcagactcaatcatcatcagatcaaaaggagattttttttaaggcattaattcttgttttctctaaatcttgtatttttattcgtattaagtggtgtgttgacatgtgacatctcttgttctttggcttgtagttacaggctattttgtaaacaatcaagaataacaaagtccaaagtcttgagttatgaatatgagttagccaagcagtttggaggcagaaggggaagttgaagccatcacagagacttaggagatgtgagggaacgtggtaacgaggaagcagtagttgatggatagttgcattttgcccacatgtttctttaaaatgtatttcttaaatggctgttccagggtttttctgtttacatcattttttccccagatatgtagaacccaaatttgggttccttatttttaaactgacttttgaaaaacatcagtcatcttcaataccatttattacagaaaatggattaaatgaaggcatgggctactttgagtaagtcttgtttcaaatgaatgttgagtaattatttttgttgttactactagttctgttactgtggctccaggagtctagtgattttttttttttttttaatgtggtgtagaggtggggtcttgtatgttgcccaagcctgtcctgaactcctggcctcaagtgatcctcctgcctcagtctcctaacgtgctgggattacaggcatgaaccagtatgcccaggcataaatttttctgcagagtgttaaatcataaaaaagtgtttagaagctgggagtttcagatatttttcatcatttaaaatttgtacacgaatggatgtatttttcttggttttggtaaaatagtattaatttctcactgtgcctgtgagcatagttgaagagactattcaaaaatatgtgagtattcactggttgtcagtccttgttttaggtgctagggatacaatactgaataagatataaattctagttgcgagtgggataggacagacaataaacacattaatatgtaatgttaggatgtgataagggcaatgaaagaaatagtaatgtgatggtattttagccaagatcataagggagggcttcttgtgaagtggaccttataataaagtcaaagacagagtcctgttactgtttgatgggagagtattctaacagagggaacagcagcttcaaggccttgaggcggtcacatgcttggtatatccaaggacactaagcaagccagtagagctgagcagaatgagcaaggatggggagggtatgtggtagaagataagttagtatggatgcagaagtcatacagggtcttagaggctgagttaaggactccgagttttattcttagtggggtgggcagctgtgggatggtgattatccttgtctgaatatttttgccctgtgtatttaaattttcccttgctttgtggttataagaactatcctcagacaacaaaaattggaaattaggttcttgacatctttgcccaccttctccccacaaaatcattctgttctcgctatttttaatatttatacctttgctaccatttgaagctgtgcttcattgtgtatacagttatgcattgcttaatgatggggatattgtgagaaatacattgttgggtgatttcatcattgtgcaaacatcatagagtgtacttacataaacctagatgttatagcctgctacacacctaccctgaatagtataacctgttgctcctaggctacaaacctgtatagcatgttactgcactaaatactataggcagttgtaacacagtgtaagtatgtatctacacatatctaaacatagaaagggtacattaaaatatggcattataatatggaagcattatcatatatgtggtccattgttgactgacatactgttatgggacccatgactatatttttattatcctcacctcccctcctaatctggcagatagtataacaatgagtaatatttttatgctggctggtaggcaaatttttggttcttactgaaattagcacataatctgattcttactgagtgctagtgataggcagactaatgccattccaaaccccaaagatgtacatgctctaatccctggaacctgtgagtaacataacttatatgtcaaaagtgatgttgtagatgtgtttaaagttaaagaccttttaatggagagactgtcattcattatcctgtcgggcccagtctaatcacatgagtccttaaatgagcaaagcagagtgggtcagagagatgtgatataaggagtcactcaaagtccttgcttccttcgaagatggaacaagagatccatgggccaagggatgtggtgacccctagaagccaagaattgccctcagtttacacccagcaagaaaacagggacctgggtcctacaaccacgaggaaatgagtcctgccaaaaacccaaatgaacaggaaatgaattcttctttagagcctccagaatggaatgcagcttgccgacacctggattttaggctcgtgagacctgtactggacttctgactcccaggactgtatgataacaaatggtgctgtttaaagctgctacatttgtgatgatttgttaatggcagcaatgtaaaactaatacagtgctgatagaacatattcagcttctcaaagcagacacctttagcaaattagatttaagtacagtattttcaatggttcattcattctaatatttgttaaatacctactattttctgggaactgtgggaggagctaggaataagaaaggctcctgacttccccaaactcatggtctacagtcacttcataaatagtcaattttttaatttatatttttgaatttatggaaaatttcaagcatataaatatagagagaagaatgaaactccatgtgcttgtcactcagcttcagtaactatcaactcatggccactcttctttcatgaataccccatccacatccaccctcagtgacacaaaggaaatacagaccttgctttttattttatcattttatcatttttttttttttttttttttttttgcgatggagtctcactctgtagcccaggctagaatgcagtggtgcgatctcagcttactgcaacctccacctcccaggttcaagcgattcccctgcctcagcttcctgagtagctgggactacaggtgcctgccaccatgcccggctaattttttgtatttttagtagtttcacggggtttcaccgtgttagccaggatggtctcgatctcctgacctcgtgatccacccgcctcggcctcccaaagtgctgggattacaggcatgagccaccacatccagcctttatcatctttgtcatagtataatttatctgtgaattcatttggaattttttactttctattttttgtcatgaaatttggtctaggatttttttggtgcaagttagaaaattaatgtagattagttcagttagcagaagtgctgcaatagtgatttgggggttacaaataaattttagtgaataggtgattttacaaatacagaatctgtgaataatgagtgttgactgtatatatggcaattttccatttcctgtgtccttgatttagttaatggcatcaccatctctgggtgctacatttagaaagcttagtgtttcttgattaatctgtttttcttacccattttaagtgtctgatctgtcactgagtggtagtagttttattttattaaatgttattcaaatctgattgctttttcattcatgttgtcactgttttagtggatgtcctcattatgtccccccaaatgatttattgcacatgtcttttgtttcctggattagtttaaacattttctcacatcagtatgttccccatcctcttatgtgtcctttcatcccacaagccctggttttagactcatcagacatagggttgaatttggctatgtgtcacattctttagcactattatcatcagctcctgtaaggcctgtcctttcctccatttagtattcatccattcatttattctcttttatctccattccctatttccttttctttcccatagatagccattctgatgtgtttaatatgtttacttctacatatgtatgttcaggtacaaaatgttattcgtatgtgtacatgtatttttaatgtatgtaaatagaattgtgttatagaactcattctgtttttttttacttttttcctctcaaaactgtttttaagagttacttgtgatgcaaagtgaacatttagtctgtggcttttaaaacttctccacgtgggccgggtgcagtggctcacgcttgtaatcccagcactttggtaggccgaggcgggcggatcacgagatcaggagatcgagaccatcctggctaacacagtgaaaccccgtctctactaaaaatacagaaaaattagctgggcgtggtggcgggtgcctgtagttcacagctactcgagaggctgaggcaggagaacggcgtgaatccaggaggcggagcttgcagtgagccgagatggcgccactgcactccagcctgggcgacagagcgagactctgtctcaaaaacaaacaaacaaacaaacaaacaaaaaaccccaaaaaaacccaaaacctgctccatgtgtggctccgcctcattttacttatttaattcatcggttatacccggattgcctccaactttgcatgcccacaaataatggatgtttcgtgttgttcatctattgctgcataaaaattacccaaaacttagctgtttagaacaacaaatattattacatagttttttagggtcagagatctgagtataccgtagctttaagactctgactcaaggtgtcacatgaagttgtagtcaagctggggctctggtctcacttgaagcctcagctgggggacgccttgcttcctaggtctcttggctattggcaagagtcagctcctcaagggttggactgaggacctcagttcctcactggctgttgattggaggcctcccttagttctttgccgtgtagacctctcagtatgttagcctacagcaaggcaactggccggcaaatggaagagcaagaggggctactcaacacacatcgtagttatgttgtaagctgatctctcaaaagtgacataactctcacttttgttgtattctgtgaggggaggggattacacaagggcatgaatagcaggaagcaggcatgattggggtcattttagaggatgcctactatatttctcagacatatctctgtggatttttctttggcacgtgcgcatgcacgcgtgtgtgtctgtgtgtctgtgtgaatggacataggttctctaaaactgactatgctggttagtattcccatcagcagagcatgagggtttttatatcaccacatgcctggcaacacattacattctctagggcataggggcatatcaccttgtttcagattgcctgtttatatcttttgattttttttttctagcagagttcctgcctttttattggttgtttgcaggagttatttgtaatagccttgatattagtttcgtgttcttctttcagtctattatctgcctgttaactttgtccagggattcatttgctgagcagtaatctttaattctgatgtaatttaatgtgtaatttttgcctttgtggtttgtgttcttaggcttttatttaataagtcctttcttgtgcttatgttacaaacttattgtactcttccttctatcaactttagttttattcacatctaagtcattaagtcttctgtagtaggtcttgagtatgttgtaaggtgtagggatctgtcattatgaaataaaagaggtgtttcccattaccatcttctgtacaatgtgtttttcttcattgatttgtggagtaatcgtaatctttattgtatattatttccatatatacacaggtctgtctttgaattatcaattggggtcctttggtttgtttactttttatacaaataccatgctgtttttcttactacagctgtatagagtggcttgatatccagtagggaaagtgcccctcttcattctttattgtcaaggttgacttggctatttgtttattatttcataaaagtgagtcaatttatgcagttcctcaaaaaagtcgagtgagaattttggttgtgattcgttgactttctgtattaatctgggtagaattattatcttcatagtattgtcattctgttcagatcatccactgtgtcctttttaaatgtttttcttcatagatgtcctatgaaggaccaaaacattttattccaaacattttagttattctggcagtcttgcaaaatgctgttttgtttttgataacctactattgttggttagtgctgctaaggagaaatgctatttatctttcaaagttgatcttgtatctggcctagttggatttttaaatttatttgaatagtttcttgattttttaataactgttttaatctaacttctccaatatatacatactttttccattttattaatttctcaactcccagttcgagtccctttgctcccacccctttcccccaccttcttttaatctgtttgatcgatattgaatttcttattttccttcaaaactaccagacctttttgtggctgcctttgtatggtttcttcactttaatgcccttccccttcttcttgttcttcgtctgctcaaatatcatcatctttgtgaagaatttcccttctgacccaggcagaattggttgctgttatctctgtgttcctaatacagatagttcatattctttcatgggatttgccggatttcatagtaatttctttttctatgtttgattattccgctgactcttcactaggactcctctctttcttctctcctttttgctccttccccctcaatctcttgtcactgctgtgatgttctcaatctcttgtcactgctgtgattggctatgttctcaggcaggatccatcgacagagaaaaccagtagcagctctatccatacatagttcttagcactcacaatctcagaaggagagagtgcctcttttctgatagttccagaagtgctgggaaggattttgacaaggaccatttttattggccaaacgtggatcaccagaaggcagagtcgtgccccatccaatccacatgtatggaggggagggaggttctcaggaggacaaaagggctgcttttgccagaagaacaggaggtggatgttggtcaggcaaaatcaacagaggacagctgtaagccagtcaacaacattctggatccttctttcatgaaattccctttacatttttgttgcaatgagtattccatttgtgcttatgaatacatattacctgacctcagcattcttcttcctctttgctatcctaagttatatatgccttgtacgctttgctgatggatctattaaggaaggtattcaataagtttccagtcaaaatgaaaacagtaaagatccctccatctttccatttatttatccattgagtacctattatatactagagttgagaatataaacaacagcaaaaatgaaaggttctctagctagagtctcatatattatagtaagaaagatttgtaagtaattgccactcatactccaggttttaaatgccactttttaagagacgctttcttttgatcccatagttactatcagagtgtcctgtaatcctctcctgttattacttgtttttttcctttatagtcctttttggagtgattattatttgatttttcttttttccactaaattgtaagcttcataaaggcaggagccttgtctatttgttgatggatatgtccccaatatgtagcataatgcctgtctagagatagtaagaataaatttttaatcaatatttgttgaacatcatatgagcaaaaatactgtgtgataagcaatttgatataatttgtttctctgggcctacggaagacacacatggttctgtttaggaatttggggaaatgggtttttagcttgcagtgactcttattgtcatgttgtattgcttcagtattcttatgtgctggaagctttccttacctcccagcatcaaaccctctactcttcattcttctacatttataggattccacggtaagagaggatgatccaaggttaacactttttttgttctctcacttctgattgtgtttggcccaattaattttgaaggagaagaacacttttttctaaatacgtattctttccctaaggttattagacctagtaattattaatagtcatagattttggtttaagcaaaactaaaacaatttagtaaaacaatttgtttctagatctgaggcatacagtaagatgttaaattgtaaaccaccacagctgattctttattattgatgcaatgacaaaatacatttgcagtctggcacgatggctcatgcctgtaatcccagcagtttgggagccccaggcaggcagatcacttgagcacaggagttccagatcagcctgggcaacatggtaaaaccccctctttgtaaaaaagacaaaaattagctgggcatgatggcgtctgcctgtagtcccagctacttgagaggctaaggcaggaggatcacttgagcctgggaggtggaggttgcagtgagccaagatcgcgccactaggtgtcagcctaggtgacagacacagaccctgtctccaaaaagaaaaaaaaaaaagacagaaaacgtttgcaaatgtattggacatagtcatccatctgcctatctaaataggctctaactcacagccaagtatttgttatgtcaggatttggctttaaactctgacccaggtgaaaagcctagccaggagactattgtgtatggattccagacaggcgtgggctatgttttgaatgaatgattattgtgatacaaaatttttgggggttctgagcacccaaatcaaatcatcattagtaaatcataacatgacatgaaacatcaagtttgtctttcattcaattcatgaaagaagaacaaatacaagaattgctttattttattttttaaattttttatttttattttttgagacaagagtctcactctgttgcccaggctggagtgcagtggtgtaatctcagctcactgcaacctccaccttctgggttctagtgcctcagcctcctgagtagctgggattacaggcatgtgccactatgcccaagaattgctttttacaggttaatttttacaacagtgattatggaaatttcaggaaagagattgttctacaatactttaaaagtcagatttctgagtagagctgagctttattcaaccacgtaataaggctaattgcgtgggtctcttgtgtttttctttttttatatgtcatttttaaatatatttctttttctttctttattttttgtttttgagatggagtttcgctcttatcgccaaggctggagtgcaatggcacgatcttggctcactgcaacttccgcctcccaggttcaagccattctcctgcctcagcctccctagtagctggcattacaggtgcccgccaccatgcccagctaattttttgtatttttagcagagatggggttttaccatgttggccaggctggtctcaaactcctgacctcaggtgatccacccgctttggcctcccaaagtgctgggattacaggcgtgagccactgagcctggccttttaaacatatttctatcagtaataactccttaagatatctggtagaatttaaatttttctagttctagaatcaagtcatcattaatttgtttaatgagctttcatttaagtaggtgttaagtatttttctttgtttttcataattatttcatttttataaaaatattttagtattcttttggtgctattgctctttttactgcgttgttgaggtttctacttccttggtcttaacatgttccccattataatcctgtttaaacttttgcagtaactggaaatttctggatgcctttattcctctgtgtgctttctgttcagctgaatctttttctttttatttgatctaagacttgtttcccaaaggggtttatgatcttgagaggacagagtaacccttcataatcaaaatatgcttaataaaacaggaataacttgtttactgttaatattttgctgaacatgcaaagttgaccttgagaaaggtaggcactagagacacaagatctagggtgtattattgttctgattgtaaagtgatcatcaacgtgaaaaggcattgttttcttccctacactgtaccttctcttcagctttacaatctgagtatttgtctctgtattatcactaaacagaaatgaacatagatgtctagagtgaatcttcaaaacagaacactgctagtaactatttccattatacataaatagacttgtcatttaataggagatggaaactggaaaatagggaaataaagggataactaacccaaatacaccagctaatgacagggaaggagtttaatatttttgcttgacttaatttttgtattaaacgtattaacatttttcagtaacctgaaaatactgaatatttagatttgagtttttaaatgtatagttcatttagaaaagaatagtgtcttaatcttccaaagtgactgttactctgtttttcttccattttagagatattacatatgaaatatcagtagaagctatatcaacaatggttgttttcctttcctgccaactcttccacaaagaagttttgcgacagagcatcagccacaagtatttgatgcgaggtccatggtatgtttctactttaagtatgtctagttttttcattgtataaatctatatttctagtcttgtccttttacctgagtatcgtcccatatctccaaccaggtatttcctctagttgttctattgtctctttaaacccagtgcatagggaaccgcattctactttcctgtgccatctacccatcctccctgttcttcctgtcccgtagcttcattaccttctccagtggttgcttcgtagaattgaaactttgaaatcatctttttcttccatctccttcattctgtctatgtttaagcagtcaagtcatatttgttattcagattatttttgtatcttcctcttctcagcagtccctttgaaacacctgtgatctatgcccccttactctctttggacttctccagcagcctcttcgctgactattcctacttctttgagcctgcaaatatttgctgtgtgctatccatgtgccaggcatgttagactgtggggctatgctcttgagcagaagcttacgatctcctagagggtgtggatgcaaatgaccaacacatatgcacatacctgaccttgtattaacataatcttcacaaaactttaaaaatgtaaaacaaatccaaataaagtacctttgaggaaagttctcagatagtggggagctttgtcttcttcatattctttttgctaccctgattattcctgtggcatgtatgttctttgaacatatttgaaaatcactgagggaaaggatctgggctttggagtcagaggtttgcattggaaccctctctgacagagacactcagaatgacactcagaatgaccgtggtttgaagtagtgctggcatcgtgggactgtgtgcatctttgctgaaacaagattgtgaacttcatcccttatagtgccagagtattcaagttgctttttaaaaatagacatagagggtgttagtgttcttattttctaagtaaggtttttatagtatcattatggtgccacatatttaaaccgtaatatgttctttacttatttttggggttcatcttggaaaccatatttaaaaagctcaatagtacattaaagaatctgttaaaaagtttactctagattgcaggaattagtttaataccaattgaataattgaataatttcatacttaaaaagtgtagtcctattgttatttttaaattcttgcttttttctactgattctttattactacttcccttcaattgccagataatgtgttatgcactaaatttataatagctcacagtgttataccgaatgtagataaagtaactggagttcaagagttcaagtgggctgggcacggtggctcacgcctgtaatctcagcactttgggaggccgaagcgggaggatcgcttgagtttaggagtttgagaccagcctgggcaacatagtgagaccttgtctctaccagaccttgtttctccccactgcagaaaaaaagtatttaagtaatttgatcaatatcttatgatgtgataagaggaaaagcaaggattaagcctcaaaattgctctcaaagcccatggtcttcactgttgtgtgcagtgctcaatttctgtgagttgtgccaatagcccttttgtattaacagatagtgttaatggcagaattatttctgtattgttattcagaattagatgactcccataaatatgagtttgatttttttttcctttttgtatagtcttccatacaccagcaaacttgtgaagaccttattatataactttatcagacaagaaaagccacctcctccaggggcccatgttttccctcagcagtcggatgggggaggactgctttatggacttgcatcaggagtagcaagtaagttttatcagattttttcaattctttggtgcacataaattttatctatttaggcataagaaattctgtttgcttggctgccaccattaatagttacattgaatttgtgcagctggttcaatgtgaaaacaaagtaattaaaatattaatctttctgttttgtgcggtgatttatgtaaaatgtatgcaaataatgaatggattacctacaaaacatcgtttttcaggaagaatgtttacacataaatatgcgtattgcatgaattgtagctgtatagtaaaaataaaattaagcatttgaaaacttataacactacttgtattataagaggaaatctattttaggttattttagggtatattttggttaggatttcatgtgactaattaggtgcagttttcctattacactaagtgctttcttcagtgacaactgaatattttgcagaattttgtaataagctgtgaaatggcacaaacttgagttttgtttgattgggtgcagatttcttaagtgaagaaagctcttccctaccttacaataagtcctcatttctgcttcacttcacagtattcagactacagacactagaagtaagagagtagttctggtggagggcctgggtcatgtgaagttatataaatgaaacttcctagagcgacactttggtacttgtgaggtcggcctgggagttccttactcctcccaaacctgcagcatgtcctctccttaatcacgcaggacagagtcaaatggaacacatttccacagctgcattatggctgtggcgtgctctacactccagctggacatcagtttgatatgaaaaggtagcactgtgataacttactagtgttgggagcttctttggattcagagacctcttcaaaaagcagtagacttggtctgttaattgacagaaatcagtgaaccagactttcttagatttgccttcctttgatttcttttaatattatgaattgagtcacacttgtgatcacttctgcctttggtgctgagcagcctgccaagagtgccacacctgcatagattctttgagttactcctatccagtttcctcattatttcaggggctttttgtgtcccattggaaggcttaattgatctattactgttttcttttttaaaaatcattaaactggtataagtatttaaaagctgaatatttcccaatattccaatatggttagaggtttttttggggtggcagagatagtataagcctgtaagtgctttcttcaaaacaatggcaatacttggcagttttttaaaaaagtaaacatggatttgtgtatggtttttgggttttctttcagttatgtatcatatcaaagggaacccagtattgcatgtggtatcattagtgtgccaggtgccaaaaaacatgaatttaactttagatcttttcctaactagatagcaggaaggaagccccttaattttcctagctctcagtttccttgtctatctaattagaaggtgggttgagatggtgatttctgagattattactacataattttctatggtcttttttttctcacggttttaaaatttaatattcagttaagtgcattaaaatagatttatggtttttagtgtgctatatagtcacaagacattttacacagctttcttcctaaatctttataaaactattcatgtaaaagtataaatcaagatggagtaattatggattcattatttcatgatatgtgtgactcaaaggattataaaaaaacaacaaaaggacattctcctaaaaagcacagctacgttctctgggcaaaatgaaatgtaaaaacgatcacagtcatgtaattttaagttaatccacattccaggaaagtcaatcaagttgccaggatttgacttaagttgtgtgatcacttctgatgatcttttggttggtagttaaagaattctcttactttactattggcttgagaaaatatgatttggaagttcctcactgaaaaaaattatattccaaagccaaatgtaaattataaactcatttggattatattcatttttgttgggattgaagttttcctggatatagcaagcatttcttttcatagcagtgtgtgcattgtatgtgttgcttacattatttcctttgaaacagagtgccttgttgtagaaaaccttacagttccggagtgaaatttgttgtcactgacagggcaggaggagaatccttgtactggaactgcggctggatgagtagtgaaccacttgcttggaccctcctatgagtcaggcaaggccttctgcagtttcttctcatttacttttacagatgtgtttttggttatccttttgtttgtttctgagactctgtgaaagagtctgttactttgttgcaccctgatactctccttttgctttcttctttttttaaattatactttttctagggtacatgtgcacaacgtgcaggtttgttacatatgtatatatgtgccatgttggtttgctgcacctgttaactcgtcatttacattaggtatttctcctaatgctatccctcccccctcacccccaccccacaacaggccccagtgtgtgatgttccctgccctgtgtccaagagttctcattattcagttcccagctatgagtgagaacatgcggtgtttggttttctgtccttgaaatagtttgctcagaatgatggtttccagcttcatccatgtccctgcaaaggacatgaactcatccttttttatggctgcagagtattccatggtgtatatgtgccacattttcttaatccagtctatcactgatggacatttgggttagttccaagtctttgctattgtgaatagttgccacaataaacatatgtgtgtgtgtgtctttatagtagcataatttataatcctttgggtatatatccagtaatgggatggctgggtcaaatgttgtttctagttctagaaccctgaaggaatcgccacactgtcttccacaatggttgaactagtttacagtcccaccaacagtgtaaaagtgttcctatttctccacatcctctccagcacctgttgtttcctgacttttcaatgattgccattctaactggtatgagatggtatctcattgtggttttgatttgcatttctctgctgaccagtgatgataagcattttttcatgtgtctgttggctgcataaatgtcttttgagaagtgtctattcatatcctttgcccactttttgatggggttgtttgattttttttcttgtaaatttgtttaagttctttgtagattgtggatattagccctttgtcagatgagtagactacaaaaattttctcccattctgtaggttgtctgttcactctgatggtagtttcttttgctgtgcagatgctctcttttttcatgccttcactaggatagaacagttgcttggagtcctccttacttctctctctggctctttattttctgcccattcatccattaaggaccgtcttgagttccaccttctccatgaagaacttcctttgctctcctggctagatgcgatcttttcctctaacgctttaccactataccactctgctttgtagtaacttatgtacatgcatcattctccctgtgttggctccacatacaataaaatgagaactaatgtttatataatatgagtttacagtgccacgttttgagcatctcatttattctcataataggctcatctatcagaaatagttggttttaattttttaatgatggatgaagagattttcctggttagtatgttattttgtctaagattacataggaaatagatgatgttggctcgttaatttaagctcagttcatcagacccctgagcctttgctgtttttgccttttgttcttgtgatcacccaagtcctgagggcataagctccttgacttgtgtgggtgtcccctgcagtatccagcagagcgccatccaacatctgtggactgtagtgaatactggtgtgcaattaaatgccaaaagctcatactcaagatagatgtgaactcagttgtaagaatgatgtctgtcatttgctgaatgccttctgtttgccaggcactgtggtagctactttacatacctgatttcatttattctttatttttcttttctaacattttattacagaaaatttcaaagatgtatagagtagatgccaggtgcagtggctcatgtccgtaatcccagtgctttgggaggctgacgtgggtggatcgcttgagctcaggagtttgagaacagcctgggcagcatagtgagacaccacctctataaaaaacacaaaaattagctggacgtggtggtgcgcgcctgcagaccccgctacttaggagtctgaagtgggtagttcgcttgagcctggaaggtcgaggctgcagtgtgctgtgatcacgccaccgcactccagcctgagtgacagactttgtctcaacaacaaaaaaacaaaaacaaaacaaaaccctaaagatatacacagtagagagaatggtagaatgaactcccatctacccacaacccctgctcaagaatgatcaacaatctttttttcccatttatctgcattctcctacttaaaaaaaaattttattttgaaataagttcacacatatagaaaagtccccaaaataaaaatatcacaaaaaactatatgtaactttatccagattgatttattgttaacattttatcccatttgttgtgttttttctcctcttctgtctcattctgtactttcttctctctctctccccctttctctttctctccccccaccacacacacacacacacacacacacacacacacacacacacacacggttttttaaaatcatttgaggataagttacatgcatcgtaatatccctttactcctaaatactttaatgtgtatttcctgaaagaggatatggcttatgctaccacagtatacttaccagcttcagtaaatttagcatccaactgtccttaaaagccatttgcttctacgtcaataaaaataagaaaatggatattttcctctgtattttaaagtctcctttattgagtatagcgttatttgtatttcacttaagttgaatttttacaattaggtattcttgtaaccactctgctatcaatttatctatcttacactaaaagccccatgaggcaggatccacctctcttccttctgtttattattggcactgcagtactcagtgagtgcttggttggcattcaatcagaatgtaataaataactggaagaattactaataccttttaattaccactagtaagtttttaaaattagtgtaatagaaattaacttatagattttaggttttttttttttaagcttttcaaatgtgtcaagtgtggtttacttcagtcactggaagtggttagaatgaattatatattaatatatttatcttgtgttatatctatgctaggtgcaagcaaagctgtattagtaattttccagtacaagaaaaaattgtttcctttctgtttagtttaactattcttctaatatgctgacaaaatggaaaaagaattaattgatatattactttactaattagaagagggtgttgcagttttaattaatttggtatttttaaatgaactttttactgaatcatagaattccagaaccacctggcatacttaaaaaaaaatatgtgttgtagttagaacttggagtttctgattcattagacatgaggtgggacctggtaattcgcaccttcagtaattattctaggtgattctgatgtatccgagtcatttcagcaccgctgatgaatgcatcctcctttccagttcctgaatctcttctgctgtgggcctttcatggcatgtggttgagccagtactactaactactgaggaaatgtgttgtttcgaggcagcttatggtggatttaatggacccctcctcgtgtattcccttggtttctgttcttagtgtgctctgttgctgatgaggtccagttttcaggataaatctgacaatgagtgcagtactctaacatggaataaataaattggaactctaacttccctgattctggactctacgtttaaaaaaataaatctaaatgcacactaactcttttggtgctaatatcagttattaataaattttttgcctattttatcatctaagccttttccagatctgtagtttttatgtgctatcttcctttttcaaactttatatataaaggtatggctctctgtgtagctcagtgagattcaattttgttaggtgtgtggcccataattacagccaagatttgctcttattttcagctgcagatgatcattaaacctatattttggggctttttgcttttcttcaggattgtgtccttggtaccatattgagagaggagtagcacattttaattcttgtgtggagagcagagtgtttctgtagctgtcacgtgtaaaataacaacaaaagtgaatgtaactagggattttttgactgttttttatagaatagatttcatttgctggaagcctggtaaggatttgctgtgaggtcagtcgcctgggttttccaggcagcagactttagagttaataaggaacaaggattcctatagtttcccctgtgttttaggacttacccacaggaatctttgcaaaactggagctagtagtacacctggtggtgggaggtgcctgggagcctcttaggggttcaaatccccccaatatctcaccctggattattattatcccgggacctctcagatgccttttctcatctcccactcctggacatcctggtggctaagggtgggttctagagcctgataatcagaatcagaagatttgggatagagtcatagctcagcatgaccttaccaagttctccagcatttaaaatctcattaccttatgtgtaatgctgataaatatgagaccatttgaacagagttattgtgaggaataagtgagatattatatacaaaatagaaaattatacaacatctattcccatgtaaataactgtttttgttttctgccctgaagctgtgctggtgcttattagttaaaatagaaagaaagaaaataaatttaattagaacaacagctaatgatcagaaaatcctggacaaatttatataagacaatttaaaaatttaagaactttgaatctttttggtctgctcaaatttgaaatttatgttaaaaatatttttgaaaaactgacaaaagtgaatatgccagccatgttttctccaactggcttttcattttatgtggtgcaaaatttggccaataacagttaaaaaaggaaaatttgattgttaaacagatattgcccacaagagatttctccttgcttcctaagtgaacttgccttgacaacaatcactatggtaccatttcttattgactaatttatctaaaaggttattatatttgccttgacagtttgtttataaaatttgccaattaaagattttcataaagaaaatatttgatgcagactcaactggaattacaataaatatttcaaatgtttcaaactaatcaatgatatcagtattatgggtagccttaagtatagtcagtacggcagttaatagttaattctttctttaatctacgagcacatcaccctgccgtgttaaagattttttttttttttttttttttttttttttttttgagacagagcctatctggctctgtcactcaggctggagtgcagtgacatgatgtaagctcactgcaacctccgcctcccaggctcaagcgattgtcgtgcctcagctgcctgagtagctgggattataggcacctgccaccattcctaattttttatgtttttacttgagacatgatttcaccatgttggccaggctggtcttgaactcctgacctcaagtgatctgcccgccttggcgctggaattacaggcatcagccatcatgcccatccgttaaagatgttttataaagcaaatgactgaagacccttacttccataatttgttatgttatgggacaggatgttagatggtaaagtattgtcttagcttgggctaatgtaacaaaataccgtaggctgggtgtcttgaacaacagaaatgtatttctcacagttctggaggctgggaagtcagagatccaggtgccaggagattcacttcttggtgtagaaccctattcctgacttgcagatgtccaccttcttgctgtgtcctcacagggcagagaaaggaagctctggtcttttcttttgagggcactaagcccatcatgggggctccactctcacgatctcatctaagcctaatcaccttccaaagctccaccttctaatcccttcacattgagacctgtggcttcaagataggaattttgagggtgacacaaaaattcagtccataccaggtattaagtagcttgtgctggaatgctcctcactgaaattctcaatttggaaggctactgatctcttctgcatgttggcatctaaggtacctttcagctctagtcattatcttaaaccacagctctgcttagtggtgttggtgaggactgtggccaaagtggatcactcactacccattctaaccctgctaacttgtttttttgttatgttttgtttttgttttttaaaaaacaaaaaacaaaacaaaacaggccaaaatgtgtaaggagcccctcagaaaacaattctgtgattgaaacacgttattctcttttctaattttgagggccaccacttacattgtcctttggaggatctagctatgggttacaataatttggtattacagaagagggacgtactggactgtagatgtttgtgttaggtagacctggaattgaatgccagacctgctatttattaactgagtgttcttgggctattaacctttcaataacttaaattcctcacaataaaatgagaataataccttcctttgtggggctgctgagatcaaatgagcaaatgtgtaggaaaaagactggtatcttggaagtatacaataaatggtcactattagtatcagatattattacctggtaatatttaaaatataacttttgttttaaaaatactgaaaaataaaggccttatgatttccaagtttattcagatttttaatgtaaataaattatgaaaattatcagatgtttggtatatacactgtttatatattgtaatataacatacatataataatgtatacaataaatatataatagagattcaggtagatgatgaaagaaatatgttgaaaatttgataccatgaggtgaaataagttgtaacatttattttattttattttttttcatttgattctgtccttaccactttggacttttcttttaatatatttttctccaatgtctaaaaaaggggtgaagcaaggaagtgttgactttgaaatttcttctgtgttttaagttataagacaaagctgtaatgtcattataattatttcatattttgaagagtcaaatctaattaaatgtgttctgccaaacttcactttccaccacaagtactgaggttttacacaataacttctgatatatggtttttccatttgaatgagccatccaaaaaaattttttttttcctttgcttgcaatggtgggtgtccaagccaaattataaggccaaaggagtgtttatttctttaggcaaatgctatgatagagaaattcatacagtagaacttgaagattaaaactcatattcctaatttctgtttttgagaaagctgttgaattcattgtgatgggtatggtatgcagtaattataatgtattttacttgattgttatttttctcttcagttttggctttttctagggtgactcattgagagagaaaaactacagtaagagaaaaagtatgtggcaatcagaaacaggcatagttgtgaaaataacagatttctaattaaaacacttctaactttcaaaaaagaaactgcttaataaacaataattatattctcatttcatctctatttggaataatttgagagattttacgtgctcacagaaagaatgacttttttcccccccttttcaggattgaactcattttgtgacttataaaatatagttaatttctgtttactgtttctgtgcagtggttccttgcagggatacattgatgatttggaatagtgtttatgatgcaaaagaactatatttagttgtagagtagtaataaaaattattttatttttaattgctctttgacaaaagtatggtttcagattttagacttcttaaaaggtgttttaaaaatgatattcattggaaataatctaatgtcaaaatacagctttgttatctttttttcttgtaatttgctgacaaccacttttaaaccagttcccaggattggctttgggaatcattaagcccaccttctactctcattttcttgttaacagatttgaagggaagactgatggcctctttcatgctacaaatagttgaagaatgaattagtttgtatttacaaggaggaatatagaataaagcaatcaattgcagatgaaatcctgggataagtttctgagacttgctacaagtgccatttatttggtgctaatgatttaatctatttttgagactgagttgtaaattgtagaatttaaaaatatttaaaagtgagaatattaaaattgaaattatggaattctattttttgagactataaatcttattctttgaaaaatgaagtggttaaaacttatttgctttgaaactgttaaattatatcccagtcaagtgagtgtaaacttttattaagcagctgttttaatttatgtttatttcagaatggatgcttggagtaaatttaaagattaaatttattcaaggttactcactgacagaatttgtgtatggtaggaaaaatcctcaaactatagcttgtgtagttttgagactaccttttacatgaataattcttaatatttataattacataaatatttttttcgaagactaacggtaagagttattcaaaactttcccttttaaaatagaatcaggccagccacggtggctcacacctgtaatcccagcactttaggaggcccaggcaggcggatcacctgaggtcaggggttcgagaccagcctggccaacatggtgaaaccccatctctactaaaaatactaaaattatctggacttggtgttgcacctgtaatcccagctattctgtaggctgagatgagaggattacttgaacccgggagatgaaagttgcagtgagccaagattgtgacattgcacttcagcctgggtgtcagcgcgagactctgtcttgattaaaaaataataataataaataaatagaatcactgtgtttctgcaacttaactttgacatacattaataaaataagttacatttatggatgaatagagggattgatagatggatagagatattatcacaaatacagcaaaatgttaatgtaaaatcttggagctgagtttatgggtattcattatagagttttttgacttttctatatgtttgactattttcataataagtgttggaggaaaatagaatcactgtgaggatgaattactgttgtaaatttcagtttgtctattaaaaatgtatatcttaatctttagtccttccagaagtgctaggtaagacagtatatgaagaatgtggggtctgatcagacctgactgcacgctaataagctctatacttgggaaagttatgtaatttctccaagcttttccctatctttaaaaacggaatgatgatgctttataggattatggcacatggctcttcatttttcccctcttgtacttgttcataatctttgtgataccatggtccttaaagtcctgtcaaacacaattggacaagtggtggagagagagcagagtgccattcatcatggtgcttagcagccttcatctcacttctgcaggacacaggggtcccatacttgacaaaaggaagagagggagagaagcagctgtccctcttcactagcagggtggtggattggaagaggatacgacttttggcatcagaaaggtctcagctggaaaccaggccctgccttttgcaagttgagtcaccttgagcaagttatttaactttgctgagccccagtttcctcatttaaaaatggaacttagagtatctttgtctgtgggcttttgtcacatttaaataacgtgtgataagtgtccagaacaaaatgcgagctgaaaacaaatactcgtttaccattcacctacttcatctttttttctccctctcatctatgtcaatttctttagttttccaaacaaccttaaatgtttttatctttcttgtttcatggtcctttagcctttcagcttgcaaaattacctgcaaaattaatgtaatttccccttttttagattattaaaaaggataataagtgcagattaaccccagtagcacccttcaccataacttcatcaaattggaagccttgctagctatcagtatcatttttcaggcctattaacatttttcaggacaattaactctagtccttgtgctgtactttagatctagtttgtttattttagaaagtgtagactagcagatattagctttaagagagcagttgtcttcaatagtaactgtttgaaagtgtaaagctttgcaacaatgtttctaaaagtagaaataatgttacctatttatggccggttgcgtggctcacgcctgtaatcccagcactttgggaggccgaggtgggtggatcacaagatcaggagttcaagaccagcctggccaagatggtgaaaccccgtctctactacaaatacaaaaaaaaaaattagttgggcgtggtggcaggtgcctgtaatcctagctactcgggaggctgaggcaggagaattgcttgaactcagagggcggaggttacagtgagccgagatcgtgcccctgcactccagcctgggcgacaaagtaagactctgtctccaaaaaaaaaaaaaaaaaaaagaaaaagaaataatgttacctgttcatatacatgtttatcaagagagatgctatttgagtaactaaaaaattgtggggttatcacttacttttcaagataatttcttaaataaaaaattgtgggacccttatttttaaagataatttctttctctctctctctctcttttttgtggggggacagagtcttgctgtgtcaccaggctggagtgcagcggcgccatctcggctcactacaacctctgactccctggttcaagtgattctcctgcctcagcctcccaagtagctgggattacaggcacacgccaccatgcccaattaatttttgtaattttttttagtagagatggtgtttcatcattttggccaggattatcttgatctcctgacctctcgagctgcctgccttggcctcccaaagtgctgggattacaggcgtgagccaccatgcccagcttaaagataatttctagacctggtttgttctcaagtctcctattcttgtcttctctcagtttcccatattgttcggatccttcttcattgctcttggcttaatagcccctgcatttcctgccttagtttgcttctgtgtatcctgaacaactgcttgcatctctgggttgccatgatgctgtaagcaatggtggctccaggagaaacattgtggtcatgagtttgtggaccttggggcaagggtgtggggtatcaggtgtaggcatggagcagagtgaaatggagtagagaattagagtggagagatggtagggtctatgtagaatcatctgttttcctgggtagccattggttcttaaactgccctaggcttctctgttacctaactactatcccctctagaatatgaagaatgtgttataagcaggagttgcttattgtacctgcaccctcagtgcattagcagagagcctgggttatggaagatactaaatatttgttaaaaggatgaatgccatcaagcctttgttagaatgatatgagcagtcttgaaaatctggatggcttagccgggcatggtggcaggcacctacagtcccagctacttgggaggatgaggcacgagaattgcttgannnnnnnnnnnnnnnnnnnnagaggagaggagaggagaggataggagagggagggagagagggagagagagagggagagagagagagagagagagagagagagagagagagagagagagagagagagagagagagaaatctagatggctaaggactagggcagtaccattatatgagttgattgttttagttaaagacttttggcaaaccttcatttccaggcccacttctcactgttgccccatttcagatgccttctctacttctgcacccctgccaaagattctgtcaggaatttctttcatcctcttctctgagaatttgactgtgtctcaccacattcactgctaactttctaccaaaaattgttaaaatccatcaaccacttaaggctccactatcattctctttatggttgtatctttatccttttaattctttacattttactttaaaaattaatagactttattttttggagcagttctaggtttacagaaaaatgagtggaaaatacatacagtcctcatatacaaatttcctcttcaagtttccgctgttagcatcttccattagtgtactacatttgtgacagttgacaagccaatattgatacattattttggactaaagtccatagtttagggtttattctttgtgttgtacagtactcagggtttagacaaatgcataatttccccaaattggaagcaaccaagatgtccttctacagatgagtcaaactgtggtacattcataaagtggaattttattcagcaataagaagaaaagagctgttaagccaggaaaagacatggaagaaccttaaatgcctatagctaaaggaaggaagccagtctgaagaggctgtctatactgtatgattcaaattatatgacattctggaaagtgcaaaaaaaaaagagagatagtaaaaagatcagtgatagccaggggttcagggggaggagaagatacataagtaggtagagcacagagcattttggggcagcaacactattctgtatgatgtgatgatatatcctgctgtttagctgtaaacttgatcacatttctcctattgttataaacttcagtaaacgttgtttttattatctcttctgtgtggatttactatcatttatttaaattgcatcttatgtgcatttagatggtttataaatgcttgcgtaagtatcattgcagtaaaacatctttttacgtgatgtttttcttctataatttggaagttttttcagatatattagttctggggcattttgatggaggccttcagttttacaaaataagccagtgaaaacttacattccctttctttttgatttttgtaaaatatttctctatatttaacttgaaaagtattcatgatttttttgtgtgtgtgtgtgactgcgtctcactctgtcacccagcctggagtataatggcgcgatcttggctcactgcaacctccgcctcccaggttcaagcgattctcctgtcacagcctcccgagtagctgggattacaggcatgcgccgccacgcccggctaattttagtatttttagtagagatgggatttcactgtgttggccaggctggtcttcaactcctgacctcaagcaatctgctcaccttggcctcccaaagcactgggattacaggcgtgagccactgcacacggcctattcatgaatattttattttataaaatacatgtatatttttagcaaacttgggtattttattgtcctggcacttccattatatttctaaaagaaaacacttgtttcatatttttcttcaatagactggttttctctaattcagtaacaaagtgttgacacagggttccaattatatggttaccactgagatgttttcagattgtcaatgattatatgagtattttggtacaacaaaatgatatactatgattcatttgcttttaagttatgtttttgtgttttaaatttttatttgtatgttttatttaagattctggcagaattagaaaataattgtgctaattatttgaaatgtatttattttgaaagattttttaaaatcacgtcttttagtctttcatgtagtcagtgcagagcagcgtaatttaagtaatcagaccataaatgttgatagttttttatgatgggcaaagataggtggaaagaggtgacttctctggaaaaaacatctttgttcttgcgtctgaagtttgtaacatcacatacatcttcatagtacataaaactcaatatttaagaaatatattacattttcttactacggatgttgccatgcctatttttcctcccatacccggtaggcaggttagatgtagttctgatattgaatgataaaaataccatacaattttttgtgcatgggaatttaaatttatggaacctaacatgtatgttaaatggttaaagaaataagcaatctttctttcttctttttttttttttaacacagggtcttgctctgtcacccaggctggagtgcagtaatgtgatctcagttcactgcaacctccgcctctcgggcttaagcgatcctcccacctcagccttctgagtagctgagactacaggcatatgccactatacccagctaatttttgtatctgttgtagagactgggttttgccatgttgcccaggctggtctcgaactcctgagctcaagccatccacctgcctcggcctcccaaagttctgagattataggcctgagccaccacccctcagacaccggcctggcctttaagcaatcttagtaaacatgattgcaacacacaaaaagagtgagccaaacagaaaagagaatgaagagctctaatgaccttgggattcttggtataacttccagagatgtacagaagccaatcatacgatatgaatgtctgaattccccctgctggttctgtgtggagctagatgttgcttattggactggagatgtaattttactcttattttgcataaagcgaaaatgaattaaatctctttcaaaattaggcaaatattgtaaacagtacaattgccaaactggaaatgaatgttacatttaaattatgaaagaaggcagtgtgccaataggaaatattactttgttaagaatgtagttaggttcagctgctttggtctttatttagtaaaactgaatatgtatctactctttaacacactgtctccattcttagatgtactccataggaattcgcacgtgtgtaccaggaagcccatatagaaacattcctagcagcattctttgtaatggtctcaggcttgaagcaagtcagaagaccatcaacagtggcatggataaaaagtattatgttcaatgtacacagctgaaggacctacagctactcatataaacctggatgactcttacagcacaatgttgagtgaaaagcagcttgaaaaagaacacatatagtgtgaaagttcaataggcaaaactgtattttttgaaaactggcaaaactaaactatgtcatttagggttttatttacaggtggttctgtgtgtaaagaaaagggagggaatgattatcataaacttgtaaaataatatttgatagggaagaaactacctatccctagttggcctggctggtcttgaactcctgacctcaggtgatctgcatgccttggcctcccaaaatgctgggattacgggtgtgagccaccgcgcctggccacttgtgtttttttcatgtgatgtttacaatagcccttggaggtaagtggtgcaagacaaatgtcatctttattggtaattttatttataccagtggctttgttaccagaccccaccacttacccaaagttagccctgggtcaggggtttcctcatcattgtctcttctgtgggtcaccaaaaagatgttaccagaaaggggtcccgatccagatcccaagagagggttcttggattttgcacaagaaagaattctaggtgaatccatacagtaaagtgaaagcaagtttattaagaaagtaaatgaataaaagaatggcgactccgtagacagagcagtcctgagggctgccggttgcccatttttatggttatttcttgatgatatgctaaacaaggggtggattattcatgcctctttttagaccatatagggtgatgtcttgacaggttttggccaggttctttactgcagcccttttttttttttttttttttttttttttttttttgggaaaaaattttgcttttttgcccaaactggagttcaagggggcgaccttgggttactggaacccccccccccctgggtcaagggatttttttgcctcaacctcctgagtaactgggattacaggggggcccccccccccccaattaattttgtttttttaataaaaaagggggttcaccatgttggnnnnnnnnnnnnnnnnnnnncttttttttttttttttttttttgtgacagagtcttgctctgttgccgagactggagttcagtggtgcgaccttggctaactggaacctccgcccccctggttcaagtgattcttctgcctcaacctcctgagtaactgggattacaggtgtgcgccaccacgcccagttaattttgtatttttagtagagatggggtttcaccatgttggtcaggctggtcttgaactcctgatctcgtgatccgcctgcctcggcctcccaaagtgctgggattacaggcatgagccaccatgcccggcctactgcaacctgttttatcagcaaggtctttatgacctgtatcctgtgttgacctccggtctcatcctgtgactcagaatgccttaacctcctaggaatgcagtccagcaggtctcggacttatttaacctagctcctattcaagatggagttgctatggtttaaatgcttctgatagcttcaaggattaattacaagtgcatgtacataacgccttatctctggcacccacctctcttctaactttgtggcacatgtgattaggactctgttagtcttagaggtacctaaatctgtgcttctattctacctttgctgtctcagaaaacctaccttccatttagctctcaaagccaagagctaacccaactgatgcaggatttttcttcttagtcactctgcaagttggggacccctggtggtgatgccccgcctgggtcttgcttggccatgctgacatgcccccggtcacctgtgttatagcttgtacccatgttcagcggttcccaagttctcgtaccatgcccaagaagaatgaggatatgcaggacattgaagggtgcggagggcagagaagaattttattgagctatgaaaatggctttcagcagagaggggatgcataggggatgcttcctttacctgaaggtgggaaagttctccctgtgtggctgggtccagggtctcttatggactcagactggggagtgtgtgctgattggtttgtgagtatgcaaaaaaggttaaagtgaagacaccactcaaaggtggacacgacagtgtagaaaaccaattaggaaagggtcagtatatgtaaaataggtgaagggtggggaccagtcaggggaaagcacgccaaacaggaagacaagttctcaatccggtctgaggatttaacttgcagcttggctttcaggctttaaactctctttggcttagaggtgaagtttcactggggacctgcccctgtctgcctagacatttggctgcctcctgctgctctcacagcctctgttcttgatttcatcctttacgtcccccaatcccaatataccctcagttatacagtcacacacagtgcatcaacataagcaatagtgaagtttatcagctataccagtgtctgtagctttcctagagataaagatggccagtgtatgagaaaagaaaaaaagttaccaggaaaatataaatgtcttaagtttgtaggtacttctcaattttacctccagatcatctgtctgccccttcctctcataaccttaaacttcatcatctctcatgtgaattctttttttttttttaattattatactttaagttctagggtacatgtgcataacgtgaaggtttgttacatatgtatacatgtgccatgttggtgtgctgcacccgttaacccatcatttacattaggtatatctcctaatgctatacctcccccctccccccaccccacaacaggccctggtgtgtgatgttccccaccctgtgtccaagtgttctccttgttcagttcccacctatgagtgagaacatgtggtgtttggttttctgtccttgtgatggtttgttcagaatgatggtttccagcttcatcgatgtccctacaaaggacatgaactcatccttttttatggctgcatagtattccatagtgtatatgtgccacattttcttaattcagcctatcattgatggacatttaggttggttccaagtctttgctattgtgaataatgctgcaataaacatcttttatgtgaattcttacagacctaccttttgttacagttttttccacacttttcttttggagagaactttctaaaacagctaaaactttattgtgttggctctcttatttatactcttggtgtggatctcactgataataagattgtaaagccctcagtggcacacagtgaccatcgtaactggcagtttgcctgcctgttgatcctcagttccacttacatgatccttcccttctccagctgtgccttgtgcttctctgcctctgtggcttcggtcctgttgtccctctgcttagacctgtgctgtctctaaggaagcctctagccacatgtgacttttgagcattgaaatgcagctgcttgaatttatgtgttccaagtggaaaatacacaacaaattccaaagattcttaaaaaatgcaaaatacttaattcatcatttttatattgattgcattgaaatgctaatattttgcctatattggattaaataaaatatattaatgtaattatttttacccatttctttgtaattttttagttggctactagaaaatttaacattataaatgtggcccttattgtttcaattgaacaacatttggctagaatgctttaccttctttttggcttaccaagctcaactgtaatcctcttaagcatatatgttttttaatgtaaaggcaacattttctatagtgtattgaattaacaaggtactaatatagaggaacattttagcaacaaagtgaaatggcctggaaaatacagatatgagtatatactctgtatttggaaaatatagagaactgtaaagaaaacttaaaatatctaataattcttttggccacacataattatggttaatagtttgatatatcttctatgtatgtgtggcaaatatacatacatatacactctttcacatgtatatgcataactgaggtcatacttcaggtatgtaattttacacatgcgggggcatcttttgtgctcagaaagtaatactggcagttactcatgttttataccaagatttttatactttattaaagtaacattttcaagtttaccctttccttcagcttttaagttcagggtaacttaaattgaataaattttagcagtagctttcaaaaagacctttgattaatattcactgaactcaggttaaacagactgaatcccatgtaattaatgtcatttataaacttagctaattaaatccattaaaataataaaactgccattacaaatttgatacattagattttctttttaatcacttgacgtgtctacccaaagcacttcctattcttaaacaatcatagtatatccaatatagtgaatttctaattcttttaaatattttggtattatttacaagctttgagttttgtatgtcttggtgctgcacgcgtccatgctgttttaccttaacacagggatggctggctatacactgaaccattatgttgtccctgtgatagctaagaattctgggtccatgccgtctggatagggttgatttcgacccttctgtgcacccatgggttcaagttacattagcactttatccttcagggagatttatgttggccagtgtttcttaacctttttttccattattattcccctaaggatcctttttgggtcattttttcctaattgtcatttctcctgcaatggcaggaaattttaagaccacagatatactatgtattgattatgtactttatatatctatggtttatacattacaaagttagatttaaaaacatttgttttttttagagacaggatcttgctttgtcgcccaggctggagcacagtggtgcgatcatggctcactgcagcctcagcttcctgggctcaagctatcttcttgcttcagcctgctgagtagctggaactacaaacatacaccacaacacccaactgattatttatttatttatagagactgcatcttgctgtgttgcccaggctggtctcaaactcctggcctctagtcagcctcctgcctcagcctctcaaaatgctgggattatggacatgagccactgcatccagcctgagaagttagttaaaaaaacaaacaaacaaaaaacctttcaatcaaactttcaagtttgccacctttgagagaaaatccatagcgtaagcataaatctgcagccttctacttaggttgacccagttttctctaagtatgctttttactgctggattgcattttctgttcttttcatatctgtctgtcaggcttggagataactttcatagatatttaaattatactggatttgaatctgaatttttttatgctcttgtctagctctgcgataacaatactaacgtaatgctaatgacaatatagcttttaaaatcctatcttgtttatgtaccgttgtggtgtgttttctatgccattaatatttcttcatgaatgtaattttaatggtgtattatatggatctacccaagtttatttagccttcagcctatggttggtcattttggtggttttcagtattttgccattccagataacactttaatgaacatctttctacattacactgcagtagaacctcaggaagccttactacctgagcaggaagccattggacccatagttgcatctgccagagaccccacagtgagcaaaaagaaaaatggttcccctgttcttttccccttcccgtctcccgccagtgtctcccattgtcagaccctaacctgaagccagcaggcaaagtagttttgggaatatagcttgcaagtttgtagctccctgcagtacagatcatagatgggaggggtggaaatgaaagcaacagacatgaaatagctgataatgtggtctttattgtagagaaattatataattctcacgaaggtgcacaactagtagacggtaggactggactttaaaatcatgtgtggcttcaaagccgggatgttttcatgataccatctgtctctatcttttcttttgttgattcactgtggattgtctccattcttaaggttacccatggtccaggatggctaaaccagctccagccatcacatcttcattcaagtcagcaggacttgaatgtgtaagatatacatatatatatatatatatcacacacaagtgtgtatgaaatgtctgtttataaaattttaaaatgttgcataaagagcattcagagttctgaaaattaaaaagtaagtttagctataattctgtctctgtaaaaaaaatagctgtttttggtctttctcattctttttcagtttttgttcctagatatatgtatagattatatttcagcaaattaagtattatagtatttattgtttaaaatgttaagtaatgtcattttattttgtcattagagaatattaagggtacattatgaaagcaaaattgcatattgcagtatttttgaaaagctggagtctactagagaaaggtgcagtttgaatccaagctgtcacttttattaatttcagttcctgacttggtcacatcaagaaagcaggcaaattcttgctgtcaagcagctgaagtcattttcctccttcttttggttccatgattcatagcacatgttttgaggcaccttgttgcttttattcaaaggaaggatgttagggtacttctgccagttttcatgttgttaatgaagctcactggtttatctgggcacagttgtttgttctgatctaagttaaagaaaggacatgaaggacagggtatggaaggtaaactatcttttctgccatatcaagtgaaaaggagtattcttggggcactgcaaaggttttactcagatgaggtgtggcagtgactgctagttgtaccccttcctcattttagctgaccacatgcacaccaagaatagaccatatttctcattcttctttgtaaccaggtatggtccatattttagccaatggaatgtaagtagaaatagtatgggcaaatttgcaggtagaattcttaaagggagtacatatgctcatctttttcctgctgacttgaatgaagatgtgatggctggagctggtttagccatcctggaccatgggtaaccttaagaatggagacaatccacagtgaagcaacaaaagaaaaggatcctggcttttgaccatgatgaggcaatgtgcaagctctgctgcctttacttttggacttttgttgaagccattattatacagttctgttgtaactctccttaatcctgactcatactacgatataacatatagtagatgaaggcaagaccatgacataataaactagctttctagattgaattatttgcagaagtgattatcagaacttcataacaagcagaagagagtgggataagagagaaccatatattatacttctccctttctgcgtaccagtgattatcagaacttcataacaagcagatgagagtggggtgagagagaaccatgtattatacttctccctttctgggtaccagtttgtgtcctcagtctccagatattttcgtcatactcttcacaaaataaaacatttaaatccagagtagaagaaacaaaaacacagtgaattacacgaagaatcttctttgttaaatagaccttgaatcctgaaaatcatagtaattcacaggttgttgagaaagccattagagtgctctttaagcttagtctttagagtggaagaaaataaatgcataactcacttatgaatcgagaagttagaagcctgttaccacatgctcaggtttcatagtttatcttataaatatatgcacatttgaagttctactttggtaaatatatccatgtttattactgaaaaggtgtaatcacatgcctgttcaattacttaattaacttccttgaattccttttagaaaattaatgttccaggaaaatgtcattctgtggttttgcttattcctagtgcaccatgggctgtctccaagaattcacacatcccagttcaagaagcgggataatatgtgatttgtgcctaaaggagtttctgagccaactggatttttctgtctttcttttctgagtgatgtggtatattacaaaaaacataaaacctagacttaagcctgctagttttctgaccttagaaggggaaaaaataattaactctctacttctgggtaacctttgtgatctgaagttttaatttgttgtgttatgtctctgctattcacctttcttcttaaaatgacctgtcaggcttgttggaccttcttattctattcttcatgtatcttggtctcctagaatttccatttctcttccatctgcattttgggtaatttccttggatttatctttcagtccactaatcttcttttcagctgtatctgatctactatgaaatactttcagtgacattttctaatgtgtgagttataatgtgtgtgcaatgaagtacacatcttaattgtacaacttgttgcagatctaagtaagtgattaagtaaggtgaggacttagaatggactgttggtaaatgaatggagctggtacaatggagcttggtggttactttgtcatgaatcatttatttggaatggtgtttaggaagctaattaggatgggtttaagggagaaaggaagtcagagtataggcagaaaaataaggcaacaaatggaagggtgcatggattctagggaggttttttatttttgtttttgatcggaaatttttacatatttgtacactgtgataggaataattcagcttatttccacaaatatttattaaatgcctacatttcattgagcttacattttattcaaaacagagagattgatattcctaaatataggaggaagtatatttcatctgaaggcagaatgtacatgttgatacaggtgaatgtgtagattttaaggtggaaagacaaggtagttctcttctgatagattctgtctttcagttacaaagaggtaagagtcagctaagcatgaagattagggattgttgttagaagtttaaagagaacaataggtttccccagggactaggtcaatgtagtaggattgctgggcagagctgggggtgcacttgagatttgtggtgatgaacttaaagtaagagcaagtggaatggttatattgttcttcagctatatgtaactgccctgggacatggagtaggtggagagttggatttaatcaagattagggttttgccaggcaaatatggaggaaaagagaagtgagggaattgggaaggcatcagcaagaaagtgatttcagtactgaacttcagaatcctagttgggtgaggagggaagtgaggacatggagatggcgatggacaatgagaaaagtagtagagataacagagcgggtcaaaaactatttgagtcaggactagaggaagtgacctgaatgctgggaagtggtagtcagggagtggaatgcatgaattcagaattgtagtggcagtgcagtcaccagtggagagaatgtctaggcaggatgagactaaggggctgggtagctgaggtagaatagaggaagtgcaagcagatcaaggacttagaggctgtgttgttgggtgccttgtctgcagggacgtagaaatttacaaaatgagcacgggagtagtgtggagggaaagacagtgagctaggtgctcagattatcagaaaatgagcaggagtgatggtgatgtctgcagatgactcgagcaagaaacgttgatggatggagtagtctgatgggctatttcaaggtagctgggatgtttgaggagaaatgacttggaagcagtaatgaagagtcatctccatggtacgtggcttgtggagagagaactaagaggtcaccatttgaaaagccttctgagaaagagctgtcctcaggggacacccaggtttctgttagatcaagggtattcaaggaggctgaggttgacaatatagaaggttttttcctaatgaaaatgtgtgctccagaaggctcagtggaagggctgggatgaagagagctgtgggcaatgaacagggatataaagcataatatgataatgttggtgttttaggggaaggtaggtaatgagttctgattctagccgttgacaatttgttgggttaaggctgttggcctcctggccagggaagtgggtgtcctacttgaagggttgagagctgtgggagcctcttttatatcctgctggttccttatatcctggcaggggaaggatgttggcagactatggtcttaacagtccatgcatctctgtattgtgtagggttaaccagggaacctaaaaccatctttgaccattttgaagttaatagaaacttataattgaaaaagctagcgtgcatcagttgaagactatgaccaatataaagccaaatgcatcagtaacagaacatctttcttccaaactgcaggaattccagacacctgtggtgtgtctgtgtgtgcatgtatgtgcatgaggagctctgcagcacaaacaagcactgcatgcatagcagccagactgttttgtaggagacttagttaggatgtcctgtaaatgctagtaattttccccccatgtatatgaaaaccaaatgcaatatcccataattcatttagtaaattaatattaagttggtattaatcatagtagtaaaaatgaaaatgaaagatacatactttatgccattcatttgtatgaatataggaaagcacttgaacttttggcctgtctgtggtccttcagaattgggcagtggaacatcctgtgggaagcactgtcatgtgggtacctcagagcctgccctctcttttcagccttacctcactgcacagctccagccaaagggccacgtgcaccaaagggtcacacctgaccagcttttaatcattccatacactgaaatgccttcctcctctccacttgcagatctgtctctctccagcacactccaggtcataggcagccttcttttgaaagctctcctggagttccctagcagacttcatcatctgtgttcccacaggactttgtaaacctctcattatacagtattagaatgacattcctgctcgttttcttctttaaaatcatgggcaccttaaatgtagtgacaacaatttattctttgaggaatttgagcaggcctgcaaagagacagtttagtgaatgcttgttgaaggaatgaaccataaagaaaggggcaaaatgcctaagagagattgtccctcaggagaaatcaggaaatgcagatgtgataccaagatgaacagatggcagaagaggcaacaaatcaaaacaagcaaacacaaaaaccacagaattgcatctttttggactagcaactgtttccttttggatatggggttctgtggatgaggatgaaggagtgggagagaagtctgggaagataatttggagctagactcactgaaaaccacaaaatgctattctctagaacaaatagattgaatttaggcctgttaaatcccaggtgctgaagttctgttctatggcagattctaaacttgtattattttcagccaggatgaggggctccctttatggttttggagtaggagaggcatggcctggtggttgagagcatcagttttagagttggaacagcatggatgcaaatctgcgtagcattctgttatgtgagtaagggacttaactcctttgagctttaattctttatgggtaaaattgggtgaataaaaatgctagtgagatttcaatgtagtaatttgtgtggatcatcattaaatagcagaagctactgttttccttcccccttacttctcttctttcactcgtccccccacctccgccttcaacagttccttgagtatgatggactttaaactttatggatcacatatctcatcaatataaccttttaaagcagcacccctgatttaggttaattgatttagaaattatataatgcatagttatattaattatgacatctacagattgacatttttccaaggataaaattaagtaaaatttttaaagcattttaaaattgtgttttcacagtaagaaaatcttttatattggaaaaatattaataatcatctgaataagttttataaaatgctttgctaatcatgatggcttaatggtatcattgtttaatgttgcaaggaacagtatctatttagagccatgttcattgttaataatggtggatgtaaatctgtatttcagagagtcttggtaatggatagaagagcagttttcttcagagatctgattaatattgtctttgttcttagctcacaaaaaatggctaacagagctttttttgtatcattgtcattggcttgtactcggatcattaatgatttcatctggaatttctttgcacgcaagttttaaaatagttttatgattccattatttttaaatggaattttatgagaatcagtttagttaaacctaagtggtaggattatgcacactgaaccaccatgtgtcttattttgtgagagagaaggaaggagagggtgcctgtcactcctgttgcatggcagggctgcactcttctctcagaatacctagggcaccacacatgactgtgacttcctgacagatagaccaagtgcaggtgccactatcaggctggattatgcatactgctgaagcttagctgctgcatatttctgagatgaaaaacaaagctctaatattttctttcctcaccagctttggagactactagtgttagtgtatgcttattaactgcttgttgaaatgaattgaatgctttggggatagtttttcaatttcataaatactttcagatcattcctatcactcctatttgcatatttcacatttactacatgtaactttcttttctggattacttatgtcttgggaaccttttttttttttttttttctgagacggagtctcactctgtcacccaggctggagcgcagtggtgcaatctcagcttgctgctagctccgcctcccgggttcatgccattctcctgtctcagcctcccgagtagctgggactgtaggcgcccaccaccatccctggctaatttttttgtatttttagtagagacggggtttcaccatgttggccaggatggtctcgatctcctgagctcgtgatctgccagcctcggcctcccaaaatgctgggattacaggcgtgagccaccacgcccggcccaggaaccttcttaattctttttaaggagtaaaggcatacacatttatttaacatgcatacatggaaacccccataataaagaccccatattagaatgaagaccccttgatttattaatttgaaatcttctttttcaaatacttacatgtgtccctttctttcaaagattttagttttccagtgcttccagaactcccatcttattcctctccttaggttgatgactttactattgctaactttaaggtttgaggcaccgtgctccataactcaggctttcttcttggtattatcaataaaatcaaaataagagtttggggaagaaactctttctatctttccttgaatattactttcaactagggagtagtagttactcaaggattcctttacttttggcccatgatgatattgcacagaaccaatccttaattcccagaaaaactaacagccagagacctatatggaaaacatgactcaccacaggtaggaatatatctatacaatgtactttattacatctgctgtaattcggtttatatttactgcttcacaagtagaactcaagttcacttgagtttttgcaatataagcagttagcctaagattttactatgtagaaacctttttttttttggagactgagtcttgctctattgtccaggcttgagtgcagtggcacgaacatcaacttactctaatttccgcttcccaggttcaagcagttctcctgtgtcagcctctcaagtagctgggactacaggcatgcgccaccatgcctggctaatttttagtgttttagtagagatgaggtttcactatgttgcccaggctggtctcaaactcctgagctcagggaaccggcccacctcagcctcccagagtgctaggattacaggagtgagccatggcacccggcctactatgtaaaaacttttatttgtagtttccaaattgattctttttggttactatattgttaacgttaagtttattatttatgtttttgagtatgtcaaaatatatattattgttgattgtttctgataaaatctcatacataattcaggcttcaatcttgatttttatatggagaaagaatttcatacaaatatgtatatatttatgtatttatatatttatatatatatttatatatatatatatttatatatatagctttttttttttttctcgagacggagtctcactctatcaccaggctggagtgcagtggcacgatctcggctcactgcaagctccatctcccgggtttatgccattctcctgcttcagcctcccgagtagctgggactacaggtgcctgccaccacgcccagctaattttttgtattttcagtagagacggggtttcaccgtgttagccaggatggtgttgatctcctgacctcatgacctgccctcctcagcctcccaaagtgctgggattacaggcgtgagccaccgtgtccggaccatatgaatatttttatataaaatgtaaaaaatcatctgtaaaaatgcaaaatttaaataattctcattgttttcctatttaatgtaatacaaaagattgtgctagatcctaggagtacaaaggaatcaaaccatggtgaaggagggaaggccctctctcagggaacccacagtttagcaggaaagatgggtatgcatgtcagggttgtttagtagtggagggtggacagggtgttgcaaggttaaagtctgtatatcgtaaaggaactgttttaggaacagggcttgttttgtttgaagaaggagtctctggtggtggtatacactatcagatgcttaaagacttgtctgttttcctaaagggtaatatttccaaaactttagccacatccatgccactgccacgattttgtcttatatgagtacaacttgaattccagtttacttagttcactttagaatgacttactttttcaaaattgtaagcttattatttactttattcttgtactatgtgggaaagtccttgatcttctgagattgatgtgctagttatatatgtctaatatacataactattaaagatttttttaaaaagttttcctctgcttacaccatcatcattgatccgtgtaccattttgggaaacactgctttaggggatgacattgggacatatggaatgaagtttctgggaaccggactcagacttgtttaaaggaagggttgtctgcccctctgagctcacagcaccctttcctgtttcatggatcatagttaatttgtttattctttttgcatatgtgggtgagataggatttatctctgagggcacaaggcttttacatttattttgtttccttttatgcttcacattttaaaatactacctgcgtcatctaagtttctcataaatgtttattgtagggatatgtgaaccaagagttttactgagacagttgaattctagtacctttcatggttgttcattttagaaaacaagtaaacaggaatcgatcttcataattactgaaatatttcagtggatttttttcaactttttggaaacagttctattttctattcttcaaggaattaaacttaaaaaaaacttccatatgacatatattatgccagattataagtcagagagattctgacagaatttttttttttttttttgagacggagtttcgctcttgtcacccaggctggagtgcaatggtgcaatctcagcttactgcaacctttgcctcccaggttcaagcaattctcctgtctcagcctcctgagtagctgggattacaggtgcccgccaccaggcctggctaatttttgtattttttagtagagacggggtttcaccatgttggccaggctggtcctgaactcctgacctcaggtaatccacctgccttggcctcccaaggtactgggattacaagtatgagccaccgcacccagccacttctgacaaatttgaaactacaaaggtggataaaaagttttactgtgctatgagttttaaaaaacatttttctttgttcgcccatgtgttttttttctttcttgagatggtcaaagcattccttttgggagacaggatgggttagtaaaatcgtgttttgtgttaggaaaattgaatttgactcaaatctgttttaggaactagcagtcaccagatatttcaagagtgctttaagtgtaaatacatgtaaaaaggtgaaactattagtgacccttttttcccctttcctagcattataacatgattggctgtcattcaaggttgtgtatgttactgttttacatgcatttttaggctggcaaaaataggtgttggagactgtgttttcttaatatatatgttgattaaatagaaaaagtgatacttgaggattatgccctttaataaagatgcaacatcaagtatgcttttttttttctgattacaccaacactgtttgttttaggaaacattgttgttctaaggctattctattaatttttttctaattaaattttattgtttcttttgttgtgtgttcattttagaaatcaaagtattttgatgaggaaaaaaaatcacccaacataaaaacataagcacttgaagcatgatatatacccattatcattattatcataatcattttacaaaaagggatacatacagtgtttttctttttcttaatggtaaactttttatttaagtgtaacatatagaaaagtgcataattagcatgtggctcaagtaattattataaagtgaatgtgttcagtcaggtgaaagaattccagcactccagaaccctctctccaatactctcatcttcactctgccttcccaaccactgaggatatcactatcccaacttctaatacgctaggttagtcttgcatggttttgaactttatattgatgtattcttttgtgttttacttcgtttatttgtgaaattcatccacatttctgcatgaagcatagtttgttcatttttatgacaactaatttcattctattaaataatttaagtacagtatatatttatacttcatcctaccactagtgtctgaaagtacccatctcctagtgccctcatcagtgttaaagtattacaacttaaaatataggattaaagccaattgacacctatatttagaactttgaagataacatccttttcctttaaatagcaaatataaaattcttattacttgtacactttaaaaacatccttcagtaagtactttgtgaaggaataaattaagtttataagttggagccctccaagatttatagaatgtgaaaaagagacagctctttctcttcaaggagtctacaggaagacttgtgtatatataatacacataagtataatccaagtcagacagtggtgcagatgatcataggagatatagccagtgtgctatgagagaagagaggaaagaatagttattttttgctttgtattagaacaaatgactgtgacttggaccttgaagaattttctaagcaaggaaaaaagagagaaatgagagaaaattttaaaaaggtaggaaatagaatggcattcttggttgaatctaaacatttagtaaaaagtccatcaaccaatggtcagttctagtcattgatagatctctgaactatttccccccaccaatagtcatgacatttaggtaacttttcttattccccccgacaaactgactgcagtttatttatctgtctctgtttcatgttagtttctcctttagactgaagctgcgtgggtagggcattagtgtctttttggtacatcatgtctaatccagttttttgtactttgctcaatccatagcaggcccttaataaatgatgaaatgaatgtatacaagtacataggcagcaaatacacatttgggcacagcaagcttcctctgtggtaaagtatagattggtcaggacccttgaaagaaatcaactttgaagaaattaactgatcatcagacaaatatttttttccatatgaatgcttctagctagaaatagtatggttttgggtggctcgtgcctgtaatcctagcacgttgggaggctgaggtgggcagatcacctgaggccaggagtttgagaccatcctggccaccatggcaaaaccctgtctctactaaaaatacaaaaattagctgggtgtggtggcacctgccacccactactaatcccagctactcagaaggctgaggcaggagaattgcttgaatccaggaggtggaagttgcagttagcgagatcacgccactgcactccagcctgggaaacagagtgaaactctgtctcaaaataaataaataaataaataaataagaacggttttggttttaaaagatactaccattagaggaagctgggtaaagtgcacatggaatacctgtgtatttttttttttagcaaagcatgtaaatctacaattatcttgaaataacaagcttaaaaaattgtgatgagccaagaatttttttaaaaagcaataatattctggaattttataatacatacctgcattagttaggatatcggtttggcttttagtagagaccagacaccagtagtttaaacaagagagaaggcttatatttctctcacatggaagtctaaactagtctagaggcaggcttgctttctgaggttatccagggaccaaagttcctccaatcttgttttaccattcctcctgcagtgtcctcatacatggtttggctcccaacactatgcctgggttctagccaatggcaaggataaggatgtgaggagaaaatagcttccttttaaggatatgacctgaaagttgcatgtgctgctcccgttcatagcccatttgttggaatttagtcatgcagacatattttgttgcttcaagaaagactgggaaatgtagtcctacccagctaaatctaaagttttaaaattttatttttatcaaaaagaagaaagggagcatggtgtggaggtcaagtagctctgccacagtgtttgtcctgaaatgcatgttcaataacttttttggtgaaactttctttccttattattttactatacttatgtaggaaaagcatgggtgttttaagatttagatgtatttgttgggtcatgatggaagtaaaaatcagtttatatgcagtcgttttaatgcttgtatcctcattactttccccaaaggaagagtgtttcttctttgtatttttggttcctagcatgggacctgaccctaacaggaactcattacgtgtctattgaccgttagccttttatagatgttgactgaacatctctagcagaatttttatacatctctgctatctgacctgccttctccttaattctttcatggtatatggtttgtatcagtattacagttttaaaatatatgatatgccccttttaggagatttttgtaactgtggctgacagtgcatagtatctttttttttggtatagttctgattgaatagtgttttgtaatatgtttgttagatgtaagaaatcatttatagtttagcaagtagcatgtttaatatgaaaaagcagtaacttacctctatttcattcaatcttgataaatttatcaagcatttgagttcattttttaaaaatgaggtttattttttccttgattattatttttattgatgtttcatactttatgtcctcttcacattttgaatgttaaggataagtagtcttcagtcagtacttctttaaaaaacttgaattgtcaaccactgatcaaggaaataagagaagacatgaacaaatggaaaaacattccatgctcatggatagaaagaatcaatattgtgaaaatggctgtactgcccaaagtaatttatagtttcaatgccatccccatcaagctaccattgactttcttcacagaattagaaaaaactgctttaaatttcatatggaaccaaaaaagagcctgtatagccaagacaatcctgagcaaaaagaacaaagctggaggcatcatgctacctgacttcaaactatactataagactacagtaaccaaaacagcatggtactggtaccaaaacagatacatggaccaatggaacagaacagaggcctcagaaataacaccacacatttacagccatctgatctttgacaaacctgacacaaacaagcaacagggaaaggattccctatttaatcagtggtgttgggaaaactggctaaccatgtgcagaaaactgaaactggaccccttccttacaccttatacaaaaattaactcaagatggattaaagagctaaatgtaagacctaaaatcataaaaaccctagaagaaaacctaggcaataccattcaggacataggcatgggcaaagattccatgactaaaacatcaaaagcaatgacaacaaaagccaaaattgacaaatgggatctaattacactaaagagcttctgcacagcaaaagaaactatcatcaaagtgaacaggcaacctacagaatgggagaaaatttttgcaatctatccactgacagaaggctaatatccagaatctacaagaacttaaatttacaagaaaaaaagcaaacaaccccatcaaaaagtgggaggatatgaacagacacttctcaaaagaagatatttatgcagccaacaaacatatgaaagctcatcatcactggtcattagagaaatgcaaatcaaaaccacaatgagataccatctcatgccacttagaatggtgatcattaaaaagtcaggaaacaacagatgctggagaggatgtggagaaataggaatgcttttatactgttggtgggagtgtaaattagttcagccattgtggaagacagtgtggtgattcctcaaggatctagaaccagaaataccatttgacgcagcaatcccattactgggtatacacacccaaaggattataaattattctactataaagacacatgcacacatatgtttactgcagcactattcacatagaaaagacttggaaccaacccaaatgcccatcagtgatagactggataaacaaattgtggcacatatataccatggaatactatgcagccataaaaaagatgaattcatgtcctttgcagggacatggatgaagctggaaaccatcattctcagcaaattaacacaggaacagaaaaccaaacacttcatgatctcactaataagtgggagctgagcaatgagaacacatggacacagggcagggaacatcacacattagggcctgtcggtgggtaaggggctagaggaggggatagcattaggagaaatacctaatgtagatggcaggttgatgggtgcagcaaaccaccatggcacgtgtatacctatgtaacaaacctgtaccttctgtacatgtatcccataacttaaagtataataataataagacaaaaaacttgtcaacaccagatttgttcttttagttaattttagtttttagtttttagttagatggattttaggagttagtttggaagacccaagggatacaattaagaaactttgggaaccatcctgaatttggtttttggaacacaaggaaatattttgtaactttccttatttttctggtggacaggtttttgtgtgtgttttttttttttttttttttttttttttccaacaggaaaatgcaattccactaagattcttaggtcatagatcagaggcttggaccagcaaagagaaaggaacttttggaagaatctttgtccagtattatgggccagtttaaactgtaatgtaggcagtgacaggctgcttcatctctccctgcagtactgtttaccagaaaaaggaaggagggctctgtgtgtgtgtgtgtgtgtgtgtgtgtgtgtgtgtgtgtgtgtgtgtgtgtctgtctgtctgtctgtctgcctgcctgcctgcctgcctgtctgtctgtctgtctgtgttggtggattcagggaaagatggagaagcttcccaataaaatgttagtttatctgacattagaagcagcttctcagccctcttggaaaatcttgaagaaaggagagtgaatctgtgttgaaagggaatcagaattttgtttgtgcaatttattcagtagtagtcaactcatttctactagcaataaagatgagcaactgtgaagaggatccaaaaaacacttctatttgaccttggggaccatgttgtgattatttttgttgcagattgaactttgtaattgtgtttctcattgctctgaatcctggaacacacagtgatggatattggagctgactgtcatggagcatactctgagtggaagaaaatggctttaaatgttttaaaatgatacaaataaacaacacaaatcaatcccaaagcaaataattaatacttggctactggctgtaccttcttaataattttgattttcttattaaatgtctcaagttcttcaactatgtcatgaggattgttttgaataaacttaaatttgtggtctataattaccaattattgacaattttaattcagattttccttatgaaatggagggagcacattatttaacagaaactttcctgtgttccccagtcatcttaaaatccttcctgtattaaaaaacaaaacaaaaaaacctcttcttgctgatcctcgagtttgcttatacctatactgaaaatttataccagatttgcagtttgaggttcccagtatactcttttttgaggacctcgaaatttagggatggggactatttccccccttcccccataacagctccttaaaagttagtagtaaaaccatttcagtaatcatttaaaaagcttgatatttgtaggctcacaattgtgtaggaaattacatatttaggctattcataagatactttattttgtgtgttcagtaaaaagtacaaaatattataaatgaacagatgttcacactgaactgtttacaatgtaaagtagaaataaaaagtatctgcctgtgttagttcggcagaaacaaaacgtttcagttgcttgttttgttatacattgcttataatttatttacagaagcacttaattcatttaataagtgtttttgtaaaaaggacacctgcccattataataagtaataaaaaatatgtatatgcaaagattaaagttaaatatcacatctattgccatggtcctcgatataatcagagctaacatgttgatgatttttccctccaaaattatcaggaggttttctgttttgttgttaaagtaaaaattacagggctttgtcctagttccaaagtatttgcatcacatttttgggggagttggtgaccaggaattttcctccttcccttccttattatttttaattgcttattatgcttgaatacgtctctgttgtagaagagtcaagcaatagagtaatactacactgaacaaagtctgagactctcctgaagccaccttcactcccactctgctccatgacgaatgaccactgtctacagtggaccctgccagggacctgtagatggacttacatgcatagatatgtgtatttgcaagttcttaaaacaaatggagcatgcatatatatacatatatatctatatatatgtagtttgtgaatggcctttttcacttagtgatttctgatgagattttcccatattctacatactaatgggatctatatttttctgttattttaattttattcttttacatttatttttaaagaaataaatatattattactggggaaaaattaaactatacaagtaaaacaaaagtcttccttgaattccttgaattccatgcaatcccacttcatcctctagagataatctctgtttgcagtgtgatgtatactttgtccttcttgttttttttttaaatatgtacatatggatacatatatggtttggtaagtgattttttaaattgttacatcagtttttctgcaacttgtttttttcacttaacggtatttccttgttggtacatagacatctacatccttatattgtattccatggtatagtttaaccatagcttatgtcaccattgttactggtgagcatttatatgttgtttacattattggaccattataaacaatattacagtaaacattcctatacatgctcttttgtgtgcctattcaagtattccttggtatagaaaaaaaaaaagaattgctgggctcatgagtatgtgcattttattttcaatgaaaactgccaaatgtactttaaaaagtcctgtaacacttggatctcttactactgataatttcctatacctttactgatactactgagtcttatcagtgttatcagtcttttaaaaatgttctagtctcatgggtcatctcatcatcattacatttttaaaaattattgtttagacttccgttgtccgtttaaaatatataaataaatatatatgtgtatatatatatatttgagataggggcttattctgttgcctgggttggagtgcagtggcacagtcacagcttactgtagcctcaacctcctgggctcaagtgatcctcctgcttcagcctcatgagtagctgggactacaagcatgaaccaccatgcccggctatttcttttttaattattattatttgtagagacaaggtctcactgtgttgcccaggctggtcttcaacttctgggctgaagcagtcctcctgcctcagcctcctttattgcccattttaattttggattacttttttttttttttttttttttttttactgatttgtagatttttaaaaaaatccttttgttatacatgttacgaatgttgcttcttcatatgttacttgtctttgtgatgtgttttatcatgtaaaagtatttaatttttaaatggtcaaatgaatattcttcatgtattcttgaatgttgtttcttacataagaaaagggcttccctgactcaaggtttatacatatgcttctataattaaatactaacaaaatttcactgtcccaagaacacttaacagaattttatccttttcttactgatctggcacactacctttatcataatcttaattatcaaatacatgtagctctgtgctgacctaatttctcttctgttgacctatttgtctcctctgctgccaaatcacacttttacatgactatagctttatacaaattgtactatgtgaatggttgtatacttccctaggtcggtctcagaattgttttcttatgtatttttttcatgtagaaatgttttatttacactgtattacaaaatatcacataaagtcttgttggtattttgatggttattatactgaattttagatttacttagagacatttgacttttttttgtttttgttttgttttttgtttttttttgagacagagtcttactctgtcgcccaggctggagtgcagtggcatgatctcggctcactgcaacctctgcctctcgggttcaagagattctcccgcctcagcctcccaagtagctgggagtatcaggcatgtaccaccacacctggctaatttttgtatttttagtagagacggggtttcaccatgttgtccaggctggtctcgaactcctgacctcagttgatccatctgccttagcctcccaaagtgctgggattacaggcatgagcccctatacccagcctagatttgacattttatagtattgactctttttgtccagaaacatgttatgcctttacattaattcagatctcatatggtcttcaaattctatggttgtcagcctaaagatcatctctattttaggtttattcctgaatattttattggatttgttgctattttgattggaattaaatatattttctaattatttattgattgtatgtaaagcttttaatttttattgttgttggtggtgttgaccatatagccatagtactgcaccaaaatcttctattagttatagtgtgtcagtaatggagtatcaggtggctctctttgatattctagaacaattaactctgtccaatagaaatataatagaagccatgtatgtaattttaaattttctagtggtcatgttcaaaaagtaaaaagaaacaggtgaaagtaattttaatactagtgtatctaaaatattatttcaacatgtatttagcataaaatattagtgagataatttacattctttttttggtattaagtcttcaaattttcatgtgtattttacacttatagcacagtgtaatttgagctacagtagactcactttaaatgctcagtaaccacaagtggctagtggccactgtactggacagtgcattttttttttttttttttttttgagacggagtttcgctcttgttgtggcgcgatctcagctcaccgcaacctctgcttcctgggttcaagcaattctcctgcctcagcctcccgagtagctgggattacaggtgcccgccaccacgcctggctaatttttttgtatttttagtagagacagggtttctccatgttggtcaggcctcccaaagtgttgggattacaggcgtgagccaccgtgccaggcctggacagcgcatttctaagtggaccagaatattgcttgcaaataatgaaattttttctctaaaatttttttggtctttttttcttttgtcttaatgtttttgcttgggcattagtagtaccatgctgatgttgatgatattaatgggaatacttacaatgtttgaccactatgaatttttggctagaggtttccttccctttctagtttgtaagaatttttctttaaatcagaaactaattttaagtttaaaatatatatatatttaaatatatatatgaaaatgtggaaactctcgagatgaccatattttttattttaaaaaatagaaataatacttttaaaatggtgaacaattcttgtactttagaaacaaagcctcttgatcataatgcatttattattattattattttttgagatgagtctcactctgttgcccagcctggagtggagtggcatgatctcagctcactgcaacctctgcttcccaggttcaagctattcttttgcctcagccaagtagctgggactacaggcgcctgccatcacacctggctattttttatatttttagtagagatggggtttcaccatgttggttaggctggtctcgaagtcctgacctcttggtccacctgccttggcctctcaaagtgctgggattacaggtgtgtgccactgcacccggcttgcattaattttttttagcaaatttttctactaaatttcattcacttttttacaaaatttaggttacctaatcataaaaatctctatttctctattttgttgtaaatacagtcaatctttgtccagtttttatagcaaggattttctggccttgtgaaatgtatagacatgattcttgttctacactttggaactgctcattaccatattgtattatattacacagaatactttacagaaatacattcatctcattggtggcagcacatcctaacagggtgttttcctccccagcaggactctggactgtcttcacactaggtggtgtgggcagcaaagcggctgcctctccagagctttcttcccctctggccaaccagagtctcctgcttctgctggtgttggccaatctgacagatgcctcagatgcgccaaacccctacagacaagccattatgtccttcaagaacacacaaggtttgtggtattttttctctaatattctttgtaatggggagagtattgcttgttctatattgtttattgtcttatagttttggagatgagtgtccattgtatgttttcatattggtcaaacatgagaaaaactttagcttttcctgtcaatattatcaggaaggtcaagcatcctttatatctgatcctttatatctgtttaaatccatatttctttcatggacaaccaaccagcatgtgtttaatttgggtcagtctgtactacctgttagggataggaattaacctggaaaacccaaatgctaggttgttttaaattttcagttaaagtctgtgttctagagttttatagaactaaaaattaggtctcaaaaacaaaaaaaaaagattagaacacaaatcagaaaacctttttctgtagagggtagtggctttgtggagtcacatggtctctcctgcagtctgttagccttgccgtttttccatcaaagcagccataggtactatgtaaacaagttagatggctgtgctccagtaaatctttacttccagacaaggggcaggctgcccatgagctgtgtaacttggtattaataactcctaaagtagaaggtgagcatatggcttcatgttgaaccagtattatctcttctcaaaaggttacattctaaaagcaagattcctgtagtatagtcaagtgctgctcaacagcagggctgtgttccattaggcaattttgtcgctgtgtgaatatcatagtgtacttagacaaacctagatggcgtagctactacacaactaggctatgtggtgtagcctattgctcctagccaacagacctattcaacatgatgatgtactgaatgctgtagtcagttgtaacacagtggtaagtatttgtgtatctaagcagtctaaacctagaaaaggtacaataaaaacgtggtattataatcacatggaatcactttgaatatgtggtttatcactgactgaaacgttattatgcagtgcatgaccagatgctcaagacattttgaacactaatgtaatgaagatgggtgggaagtacagtgattggatgggagcatttgtaagccttctgatgggctgtgccatgattcttccgggttattctgatacacatttcttatagacgtggctaaatgtgcccattaattgcgcctctgccaattctggtattatttgcagtgtgtctttgtccatttgtgctgctctaacaaaatacctgagactcaataacttataaagaacagaaatctatttctcacagttctgaaggctgggaagtcaatctaagatgcaggcaccggcaggtttggtgtctggtgagggctcagtctctgcttccaagatggatccttctagctgtgtcttcacatggcagaagggagtcaagggctaaaagggctgaatgctatgtgggccctcttttatgaaggccttcatcctattgatgagagatgggcccttaggacctaatcacactgtaaaggccctacctctcaactttatttcattggagattaaatttcaacatgaattttggagaggatacaggcaaactataacacaggacaatagggaattaataacaattttacaaattaaaaaacgaaaactggtgtatctgttagtatttttctgttcccattacttactcttcttggtgacagtatggcttaatggttaagaaagcaagtttcagagtcaagcatacctggcttcacaccatacctctatcgcttcagagtgtgagacctttgacagtttgcttaatctcaattagcttcaaaagcttggcctataaaatagagataatatcacctaatagtatttgtataaagaccaagcaaggtaagtctttaaaatgattagcccagattttgcaacaaagcaggtattcagtatatggtatctactatgttactcttgttgctcaggccaaatgttggtatttagggctgaactttgcttgggatggtcatggtttgggagaccatgtagtacaatgaagcaaaatgttggcttaagggtattcatatccatcagggctgatcttggcaaagttacttaatccctttaaacatttattacattccatgtaaagctgatcagaataatgacatgtttgatgtatgggttaaataagggataacacaaacaaagtgtttagtataacagctggttcatagcatttattagctagtaatgtatatatgttgtggatacatatacacaacccacatattccctttgcagtcaggtataatacaggttggtgaatttgttactttccttcaattttaaagaagtgtagtgtgtctagaatcttcctccagtgaacattctgtagattccataatatctgcatactcacagcacatggcaacacttccttttgccatcccttgcaaaaatataaagccaaccacaaaaaaaaggaattatttttgtaagtgtcaaaaatacagtgttagtattgaaaaaatagtctatatttcaaatgtggaaggaaaagtgagggcactggatagtaaacctgaaggcattttggtgcattcccctcacaaatgtaaagcttaggaaggagaatctgagaggcaaggattgtgttggaacacatctctttttccataagagcacagcttttagaaatgttaaagcaagttgttttgttttggtagtgcttctgtgttttaaaggcttaaaaataatttggtgctttttagaacgtaaaaatattagctctttgtgctaccatgttcagagttttatttgattggatgatgactttctctgagtccattgaacttatctttatcttctttgttgcttcctaaccttggttgcttcagtttctcagcaaatccagttaactgttggaaaggggctgtgtcagattggaatatcaagaacttttcctaatacaggctgtgatttgttcttttcattgttccagtgactgtactttaaaaaaaaaaaaagtttcttaacagttatagtcaattaggtttgcattggagattatattttattttattttaaaaaaagttatagaagttttctggtagttgtctcaagcttggtgtgctcttttgattatagaacctaatgttgaatatacacagatggcccccaacctgcaatggctggacttaggattttttgactttatgatgtgcaaaaacaatataaattcagtactgtatttgataaattacatgagatattcaacactttgttgtaaaataggcctactgttacagttggattgatacaatttagaactgtacacaaatataatagcttaggctaggctagactacactatgttgtttggtaagttaggtgtattaaatgcattttcaacttagaatattttcaacttatgattaatttatgggaatatgactccattgttaagttgaggaacgtctatactgattttgatataagtggatgcttcagccacaatttatttaaaggcagtttttttctttttaattctatcttaaaagagaattttctattttgtgtagaaattatatctttttctgtagatattttttatttaggactcatggttatttagttttggtaacaaagtattttatctcaacgtcctggttaagttgtattgattggtgggccttttgcctagctcataattctgtttatttaagttcatgttcttatagctgatttatttcagctatgttaatgggaaaatagtaacaaagtcaaagtatatgactttgtttagttctttttaaagtaaaatttttgttttgttttgttttagacagagtctcactctcgcccaggctgaagtgcagtggcgtgagctcggctcactgcaacctccacctcccaggttcaagcgattctcctgctatagcctcctgagtagctgggattacaggcccacgccaccatgcctggctaatttctgtatttttagtagagatggggtttcaccatgttggtcagcctggtctcaaacttctgacctcatgatccacctgtctcggcctcccaaagtgctgggattacaggcgtgagccgccatgcctggccctaaagtaaattttacataaattaaaattttgaatctgaaatgtagtgactttccataaaattaatgggaattgagttgtacacattactttaacaatatttttatttatataaagcacagctagaaattactgatgtgctgttttctgtattccagatagcagtcctttcccctcatcaattccacatgccttccagatcaactttaatagtttgtacacagctctttgtgaacagcagacatctgatcaagcaactctcctcttgtataccttgctccatcaaaatagtaatattagaacatacatgttggctcgcacagatatggaaaatcttgtaagtatcatactaaacattccatgcgtttgtatttttttttaattatactttaagttttagggtacatggcacagcgtgcaggttagttacatatgtatacatgtgccatgttggtgtgctgcacccaggaactcgtcatttaacattaggtatatcgccaaatgctatcccttccccctgcccccactccacaacaggccccagtgtgtgatgttccccttcctgtgtccatgtattctcattgttcagttcccacctatgagtgagaacatgcagtgtctggttttttgtccttgggatagttcgctgagaatgatggtttccagcttcatccatgtccctacaaaggacacgaacccatccttttttatggctgcatagtattccatggtgtatatgtgccacattttcttaatccagtctatcattgttggacatttggcttggttccaagtctttgctgttgtgaatagtactgccataaacatgcgtgtgcatgtgtctttatagcagcatgatttataatcctttgggtctatacccagtaatgggatggctgggtcaaatggtatttctagttctagatccctgaggaattgccacactgacttccacaatggttgaactagtttacagtcccaccaacagtgtaaaagtgttcctatttctccacatcctctccagcacctgttgtttcctgactgtttaatgatcaccactctaactggtgtgagatggtatctcattgaggttttgatttgcatttctctgatggccagtgatgatgagcattttttcatgtgtcttttggctgcataaatgtcttcttttgagaagtgtctgttcatatccttctcccactttttgatggggttgtttgtttttttcttgtaactttgttggagttcattgcagattctggatattagccctttgtcagatgagtagattgcaaaaattttctcccattctgtaggttgcctgttcactccgatggtagtttcttttgctgtgcagaagctctttagtttaattagatcccatttgtcaattttggcttttgttgccattgcttttggtgttttagacatgaagtccttgcctatgcctatgtcctgaatggtattgcctaggttttcttctagggtttttatggttttaggtctaacattccatgtgtttgtattttataatattttggagaaaaacttcttttcccaagagggcaaatttatttgcctggttgccacaaaggtgatggtcaagaattgatagggagatgtcaccagacacagacggagggtaggagcttctccagcataagacacagctcatgtggaggtggcctcccagagcaggacaccgcagcgtccctggctggcttgacagcatccctccctgtccttatagtctttaacagccacacgttgcccaggattcagcctgttcaggtcttccaaaaatctcaaggagatttttaaatcatctcggtcgctgccatctgctaagtacccgcccaccaagttcatgttactcgtcacagttgcagaatattcctgatgagaatgctgaaaggaaaatgatgtttcaactcagctgcccaaatatcccacccactctggcaggcttaggctttaggactgtctgaactcactccctggagtctcatagtcattttaaggtacctttgtcagatatcacttaaattacactatccatcactacatgagtgaaattagttctcaaatttttgttcatagacaaaaactcctgtaagcaataattgatttcctttatgactaatgtgcaaacatcagtgtttctataaggggcaaagtaagctacctcaccaaggtgttaatgttgtttgaaatacatagtatgtagataactatggacccttaatacattcataaaaatgtgaacattccggaaatagccagtagctggctgacagcaatgaaatgttccctctgtaccagtttttacaggttgatagcaggattctcccagtatttggttaccattttttcagtgttaaatataaaatactgcataaatagtgaagaaacatggaatactagaattcattgaatgtattctacatcagattgacactaagaacaaaaagtgtggtgaaagtgtctccacatcaggtctaggtgggaaacactgcttaaatagcaaattgagtatgaaagtatgctgcttatatgagtaaaatcctataaagagaaggcttgtttcctgatgggtatggataggcatagagacaattctgagtatgttgtattctaagggaaacgttggcaataagcaggaaacctgtgacatcacctgtttcagaaagttgtatggtaaggatgcaggtatataagatggtgcagagagcagctgtctgcgtttgatgacatacccggtgaaaggttaaaaggttttgtgttgtagtttttttggagggtggtgtttgtttatttgttctggttttgttggataatttcttaatttatgctccatctgtccttttacctttcttctataataaatatgttgaggctctgattagaaaatatgttatcagtaggaaatttactgtgctgatctgattttgttgtagttatcaattcttttattctgcagtctttgacattaagaaggtaatgtttaacagattacagtgtttctaagaaataccttattgtgtgtaaatcccataaggctggaggcagacctgcctgtattcagcgacaggtgttggctaacttggattctttctattgatggtctgactcactactgtttgacttgttttaactcaaaacaagttaattaatctggtataacttcttatagtacatttttagttggtatctattagaataacaatacagtgactcttacattttctttttgtgtctctgaatagtgtctagggcgaatccaagtgcctaaatattaagaacagggcataagagggcatactttttagaaaaacccattagggacatgaacacaatttttatattttatcacaattaaatgtttaccaagaaaagcagctagacatttgagatggtcatgattcttttagttgtaacagacccattgcttatgcctagcataagagaaaagaaatatatctgtacaaatgaaaaatttgtgctttttttttggcttcagtcatagctggttctaggggctgaatgatgttatccaggcttggcctctccatcttttgcctctgccttttatagctttggccttattctcaggcacacactttccaagtggggaggcaggtggccaccagcagctctcaacatatcataagctaaaaggaggaaacacagctacttcagaaatatttcatgaagggctccaatagtctcttcttgggttgtgtatccacttatttgaccaatgactatgggaggaggcacacttaatgctaagccaccatagccacaaaggtaaagggaagttccttaaggaagggatcttggacaaataatatatagtcacttcaacactatattgcttgtaactttcttaatcagggcattgtgagttagtcactcttttaatttctgtttgtattagtccaacagagattcggctggtatttcccttaggcctccagcagtcttctgcttttgggtcaagccttgagcctgcacaatatcgcagatatgcaacccctgtcattttgatatcgtactcatttgaaacttcactgaagagacacttagaaaatgagattaatatttacagtgatatgcagtctatgatttatcattaattataaaagaaatgacataggatctttatatcttgttttagatggactaatagtcctttattttctgaatgtggtttttatataaacatcaaaaaggaaaatttttttttagctcttttgttttcatgctaagtttcttgaaagctacattctttgcctttacttcttatgcacttttctacctgttgtgatctaacatctgttcctacaacttcctcatcagcagctcctgattattagtaaatctctgggcatgtttcataattttcttatttgactgcattgctgcatgacactgttcatctctttattctttaaaccgccaaatacctatgtcttagtcagttctggcttagtcagttcagaatttagtctggcctgactgctttaacaaacataccatagactggtgcttaaacaacagaaagttatttctcgtagttctgtaggctgggatttctaagatagagatgtcagcccccttggagtctggtgcagacctgcttactggtttgtcaatagtcatatacttgctgtgttctcacatggcagtgagcagaggcagagaagaagcaagctgtctcctatctcttataagggtactaatcccgtcatgagggctccacccctgttacctaatctcctcccaagggccccacctcttaatagtgtcccattgtgggttagggttttaacatactaattttgggggcccaaacgtgcagttcgtatatctacaaacatataccttggctttccaatcattgtactctgctggtttttccacctctatgcctactgcttttctctctcttttatgtgttatttttccttgtccttaaatgtgtcctgctgcaggattctgtcctttttgttttttccctgtacttctccctaaaacatctaagcaaattcagttgccatttatatgttgccagtgtatatgttcccatttatatgtgccatatatgttcagttctgtatttgcagtcctgattacctgtatctcatatccatgtatccagctgccccagacatttcccagtggccgtctcatagacaccttaaaccaaacatgtaaaaattgggttcattattttccctgctcttccttctcttactcctgtattctctgtcacagggagccatccatagagttggcaaaagctttgactcctctgtctcattcccccatatccaaccaaatattttttattttctctccttattatctttggaatgtattagtgttctttttcctcattgcgattcctttggtctaagctgccttcatctcttactaaaattattgcaacatctttaactggttttcctgctttctgacttgctattctttaatattttttatcctgtttccagagtgagtatattagagtcaaatctgatcatgtcacttccctacttttaaagccctttcatgtctccacagtgccctcaggttaaagctcttactcttaacgtggctaacaagacactttataattttgccacagcttccattttgggtctcatctctttgccattatgttctttttattctttatttaatcataatgaattaatttaatgtctctcaatctgacctatctcctaactttagacttggtttttctctctagaatacttctccttgaaattttctcctttttcctcttctcagataactcctagtagtttttcagatctcagtttagatagttctttcagaattaaagtgctattataaaagtaattatataccatatccaagtgggatttatcccagaaatgtaagcttgattggacatctgaaagtcagttattgtgatacatcatatcaacagagcaaaaaacaaaaatcatatgattatttaaatagatacagaaaaaagcatttgacaaagtaatcacttttttatgaaataaaaatatttaacaaactaggaatagaagggaacttccttagatgagtaaagggcttctatgaaaaccccacagctcacatcatacttaatggtaaaacactgttttctttctccccgagatcagccacaaaacaaggatgtctgcttttgccatttcattcaacattttactggagattctagcctgggcatttgattaagagaaagaaattaaacatatctagattggaaagcaaggtgtaaaattatctgtatttgcagatgacattatcttatatatagataatcctaaggaatccactaaaaaactcttagaattaatagatgagttcagcaaagttgcaggatactggatcagtataaaaagtcaatatgcaaaaaatagtatttttatatatgagaaatcccaaaatgaagttaagaaaatagttctgttcataatagcatcagaaatttaacaaaagaagtacaaaacttacactgtgaaaactacaaaatattattgaaagaaatggggaaacacatattcattgattgcaacataaaaaaaatagagatagagatagggtcttgctatgttgcccaggctggtcttaaacttctggcctcaagcaatcctcccacattggcctcctaaagtgctgggattacaggcatgagccaccatacccagccctgatcacagtacttcacattgttaagatggcagtattccccagactgacatacacattgagcacaatacctattagaatcctagttgacttctttatagagattgacaagatgattaaaaaattcatgtaaaattacaaaggtccaagaatagccaaaacaatcctgaaaaagaacaaatttggaggactcatactttctaatttcaaaacttactataaagcaacactaatcaatacagtgtggtactggcacaaggatagacataatacatcaatggagttgaattgagagtctagaaataaacccatatacctatcatcaactgatttttagccagggtgccaagaccaatgtggaaagaataggttttttcaacaaatggtactggtgccactgtgtagtcacttgcaaaggaataaagttgggcttttgcttcaccccatatacaaagttaattcaaaatgggtcaaagacctaaaaagagctaaaactataaacctcttagaagaaatgggggtaaatcttcatgaccttgaatttggcaaatgactgttagatataacaacaaaagcatgagcaatgaaagaaaaaacaggtaaattgaactgcatcaaaataaaaacgtttgtgcttcaaaggaccatcaagaaagtgaaaaaacagcccacaaaatgtgagaagatatttgcaaatcacttttctggtaaggaactgtatctatagtatgtaaagaactttttaaacccaatagtagaaggacaacccaattaaaaaatggatgaaagatctgagtaaacatttctgcaaggaagatatacaaatagctagtaatacacccatgaaaaaaacaacttgacattattagtcatcaggtaagtgtaaatcaaaatcacagcgaaataccactttactcccactgtgatgcctagaataaaatgttagataataagaagtgaggatgtggagaaatctaatctctcatacactgttggtggaaatgtaatatgatgcaatggctttgaaacagtctggtagttcctgaaacaatgaaacagttaccatatgatccagcaattccaaggctagatatatacccaagagaaatgagtatatgtctgcaggaaaacttgtaaatgaatgtttatagaagcattgttcataatagcaaaaaagtggaaacagttcaaatgctagtcaacagaagaatggataaatgaaatgtggtatgtttatgcaatgagatattatttgacataaaaaggaatgagatcctgatacatactgcagcatggatgaactttggtaacatgttcagtgaaagaaagtcacaaaaatctacatagtgtatgattctattcatacggaagtccagaatagggaaattatagagacagaaagtggttcctttgggcagggtagataggggtctgggggaggtgatagttaaagggtatggggtttgtttttgagataatgaaatttttcaagttgcctgtggtgatggttacacatatttctgagtatatggtaaaccattgaattgtgcactttgaatggattgtatggtctgtaaattgtatctgaatacaaatatttaaaagaatgaagtactattctgacatagtctcattggacccgttacttactcttacattattatttctttgaatataccatttgcttgtgtgtcttgtcaatattttcagtactctattggtattatgtactataggtaagatgtgctttctacaggcgtagccaaaaaaaaaaaaaaaggcataaaatatacagtcacatgttgcttaatgtggggaggcgttctgagaaatgttttattaggtgattttgtcattgtgcaaatatcatagcatgtacttacacaaacctagatcgtagagcctaactacacacctaagctttatggtgtagcctatggctcctaggccataaacctgtacatcatgttaccgtactaaatactgcaggcacttgtaacacaatggcgtttgtgtatctaaacatagaaagggtacagtaaaaatatgatgttgtaatcttatgagacaatacaaccacagactgttatatatgtggtctgttgttaatggaaatgttatgtggcatattgaaaactccagaatcagaattaacaaatgttgagttaaatgactaaaaaatgtaactatgcttactaggtaatgtggaatgtgagtacaatgtattatgtttgacaaaatgtcagaaggaactccgaagacaagaatgcctgggaaaagagacagagcaatgactgcttggtaactggtatacttcgttcctggaagttaatagtgctcatgcactgaacttcataatttagaggaagttttagctacaacttgtaaaagaacaaaacataccagtgccacattttaaaagcttcctgcaataggtgtgcctgtcaaaacacgtatgccccaggcataccagcttgttttggtgggctttgcataccagcctgtgctttaaggacttgtatgtgtaaacaatttgctcattacatgtgttgtctgatttagatgatagatttttttttttgcctgttttctagcattcagtggatagtgttcatggttgtttccaacaagacatgctatgtagatagtctgcccatctttaataaataatttcagtaacctccttactttagtgaagaaggaacaaattgaaggtgtcaatgatttgaaataagcacaatggtaaacagcattatgaaatgaaatgtttgatagatatactgaagagcagatcttaatacacatgttgagaaaatgcaccttgggttccaagagtctaattacatatttatttaaaatatatttcttgaaatatattttttacttactagctttaaaaaggtggtgctaagcacataaattaaaaagttaacttctgagcagctgtgctctccccgctactcccactttttggttaagttgggagaaggcaatgtgacttcttaaaatcttcaaaacaaacaacgagcctaaatggtccttgcagatccaacctttatgttggttagaccttaagagaccttcacagagttagtggtgattttctccactggcatcttagctatacatttggaaaatacattcagtcagaagtgggtttatatggttttttctctaatgaaaaatataactgatattaaagcaaagagcacaaaatgaaagtgtaaagatttaaaacatttggatttataatgaagtattgaaatagtcaattataatttttattctctaggttttaccaattcttgagattctgtatcatgttgaagaaaggaattcacaccatgtgtatatggcccttataatattgttgatccttacggaagatgatggcttcaacagatccattcatgaagtggtaagttaccattacttggattagagttagagttaacagaacagacatgtccctacgtaagatttactagtctttacatttctttctggtagatgttcctgtgagaacctgtattagaaatgttatgtctttcttcagatttatgaagcggtgctttttttttttttttttcccagaatgactattaaccactattaaaaactctctcaaaatggttctttggtaattgatacaaatgcttttgctgctactgggttcatttttcttcagcatttcatttccactttttcattgtggcagaaattgtcaaacaggtttgcttcatgcatacagaattagagaagaaaaagggaccaaaatggaagaagtttgagaaatccattgttttatatatatatttttaaagaacataacataatttaactttttaaattttggtcctgttggagagttttattcccaaactggtcttatgtttctctttggcatttttttattttattttttgcatcaaagtaatacacatatgtagttttaaaacttgtatagaagtacaaggttttaatgaaaaataacagacccatgttcaccctatttctgattcccactcctgtaaggcaaatgctttcagttctgtccatgtttcgaagtaacatacttatattgtgatttcttgatttttcagttgcagacattaactattatcgccctaagatggaagatagtcattggttcttcctgcattccacaaatgttccctctgggttcccagcacgcttgttggcacacagactttttcctttttccatcttattaccatttttggttaactcagcttttacattattatttttgatgttatttttagttcagctgtgtactgtaggataattgcgtttcctttcttgaacatgttttaccatttctgtagcacatcattgccctgttttttatttgtgtactaatacactgattctacccccaatacttcaacagaactgaaaatttgctcaaaatatattcaaacttaccgaattttctttttggactcctgtctttcctggagcatctggtggccctggttgatctgttcatctgtaggagtaagcactaagaagtcgattggaagtcctgtgtgtgggcaggtcttacttactgtaccttgttgtacatagtctctttctctgggactgtgtccctgcaggccattttttgggtggattgtttttgattcttccagtctccttgctaggggttctataggagaagggggcagggctttcactctttataagggtacagacactttgttttctcctcattttcagtagggcttttatattatatttactcctctctaatgttcccttaagtcatgtttttgcctcttacatagtatgaccataatttcaactaagatttaaggaatcttgaccattgtggaaggagtataaaacatacaaatttattttttgtgtgtatatttaagttatacaacttgatgttttgatatattaatacatgtacatagagaaatggctactatagtcaggtaaattagcatatccatcatctcacatagttacctcctttattttttgtggcaagagcaatgatactctcctttggcaaaaatcctgaatacaatacagtatcattaactatagtcctcatattatacattagatctctagacttcatgccatatacctgtaactttgacctatatctcctcattttctcacatccaccccctggtacccattgtaatatcctctatctgtgtatttgactttttaaaaagataatccacatatatgtgagatcatgaagtatttttctttctctggtttatttcacttagaataatctcctctaggtttacctatgttgtgccaaatgtcagggtcttcttttttaaggctgaataatattcctttgtttatacaaccatgcactacttaacaattgggaagcattgtgagaaatgtgtccttaggcgattttatcattctgtgaacatcgtagagtgtgcttacacagccaagatagtgtagcctactacacgcctaggctgtgaggtatagcctgttgctgctggccacaaaccagtacagcgttgttactgtatactgtaagcagttgtaacacaatggtaagtatttgtttatctaaacatagaaaagctaccataaaaatacagtataaaagattttaaaaggcacacctgtatagggtaccatgaatggaacttgcaggactggaagtggcactgactgaatcaatgagtgagtggtgagtaaatgtgaaggaccaagacattactgtatgctatcgtagactttataaacactagacacttaggctacactaaatttataaaaatatttttctttaataatcaattacccttagcttactggaacttttttactttataaagtcaccacaaacacatgaataatgtgttgtgctacaatggctacaacatctaggtgataggaattttgtaataatcatctgggaccttctttgtatatgctgtctggcattgaccaaaacattgttatgtggcaaatgactgtatgtattacattttctttatccatttgtctgtcgacggactctctggctgtgtctgtcttggctattctgaatagtgctgcagtgaatgtgggagtgcagctatctttataggtggtgatttcattttccttatgcccagaagaggaattgtgagatgatacactagttctatttttaatttctttaagaatctatatactgtttctcaccttggtggctccaatctacatttccaccaacagtgtgtaagggttctgtttcctgcatcccctcccgtacttgttatctcttgtctttttcataatgactatccacactggtgtgatggttttgatttgcatttccctgattaattatcagggaaattttgagctcaaaatgtgattttgagcacattttcatatacttgttgaccatatttatgtctcttttggagaaatgtctattcaggtcctttgcccattttttaatgggattgtttttctgttattgagttgtgtgagttctttatatattttagatactagccctttatcagatatatggtttgaaaatattttatatcaattcagaggctgctttttcattttgttgattatttcctttggtgtgtagaagctttttagtttaatatagccccattaatttatttttgcttttgtagcttgaccttttgatgtgaacatagaaatttcttggttcttgttttcagtaaaatactatgagaagtaatattttcactgatgtaatcaactttttaaacatgacttttcttttaataaggaattaaaaacaaatatgatttttaaaaacatcttaaaattgaagtataacatgcatataaaacacacaaattttaaaggaaaactaatgaaaattacattctatatttgtgtcattaccacccagataattatttgcttcagcagcagcaataacaaaataatcagaacaagaaaaagtaactgtaaccacacaaaaaactttgaagcaaacatgacaaaatgttagtttttggcataattcatatgtggttatactttttattgtgctattttctatacttttctgtatcctcattctataattaaaacactttcaagttagcagagaattttgcattaaaattaaacttcgctgactgccaaaacagggttggtaagatagggaaagttcagttcacattgagttcagttccattggatttcaggatattttagatgacatttcaaattcaaatattgaaacacttgttctttttctctagaatctgactttcttgttgatctcgatttattttggtcccttccctttccatatgtaatagtagaaaagagtaaattcaaatgttttaccaagtttctctacatggaatcattagtgtgaacctaattgcctatgatatatatattgttatctcattttgatttgaatttgcatttcttaatacccaatgatacagagaatttatttttaatgtgctttttgtgtgcatatatatctttttgccattttttaaattatcttttttattttgaaataattgtagattcacatgcagttttaagaaaagtaagagagacctcatatacccttaatacagttttccccaatggcaactgtagttgtaaaactgtagttcaatatcacagtcaagatatttgatacttttgtttgtttgtttgtttgtttgtttgagacacagtctcgctttgtctcccaggccagagtgcagtggcaggatccagctcactgcaacctccgcctcgtgggttcaagtgattctcatgcctcagcctcccgagtagctgggactacaggcacacgccaccaggcctggctaatttttgtattttttattagagataggaatgtttcaccatgttggccaggctggtcttgaactcctgacctcgagtgatccagccgccttggcctcccaaagtgccaagattacaggtgtgagccaccatgcacagcctgacattgatactttttaaggtatagaatatttctatcaccacagaattatatccctcatcttgctcttgaatagccatacccccttttaaaaacttggcttatcttattattgagatgtaagaattttttattctggatcttttgcttttttatattctagtttgttaatgtgaattatactggttattgagaattatagtgattatttattgaatattaaatcaactttgcatcctggggtaaagtgcacttggacatgatatgtttttaaatgtattttcatatacagtatggttgagttttgaactttgtgttttctgaggaatttgtacatttcttttaaggtaaagaatctattacaataaaattgttcataatatactcttattacctcttctttttttttttaaaaaagttaccttttaatgtctgtactagccatagagagattacccttcattcttcatgctgataatgtgtctattctcttctttatctttctaactttttaaaaaagttaaaactttaaagaactagcttttgagtctattgattgtttttcctccattttttgttttctattttaattatttgtgctctttattatttcttttctcctgcttacttgagcctcaatttgccttttttttccccaacgtttcttaaggtagaagcttagacctttgattttacatccttctgcttttccactgtaagcaaaatatatgaaaatggttttcagactttggacaataggcagcacaggagagtaatgctagaaagaaaaaaatgtatttaacagtaattatttttaagaatttgaaaatacattaaagtcaaactttatcactaccacctaagatgtgaataccttgacgtaagacaaattattctactgttttagtgtaaatgatcatactcattcattaactagaattagaactattaacattaggtgaacatcattttcagaaaattttcttctttttatttaagttgagacagggtctcactcttgccacccatgctggagtgcagtggcacaatcgctgctcactgtagccttgacttcctggtctcaggtgatcctcctacctcagcttcctgagtagctgggactgcaggtgcatgccaccatgcccagctaatttttgttctgtggagatgggtttcgccatgttgcccaggctggtctcaaactcctggtctcaaatgatttgcctatctcagcctcccaaagtgctgtgattacaggtgtgagccaccataccagaccttcattatgcaatatattttttaatattattatatggtgaagaaaagagattttggaaagctaagatgttagaatcattgtttagttattttaaatccatgttgcagctgtagagagaaccagtgtatttcttagtgagaagcatgagaacattattaattccacacttcttttcatctctttcttccaattttttgttagtttaattatttaattttgtaaaaatttttttgagacagagtctcactctgttttacgcaattctcgtgcctcagcctcccaagtagctgggattacaagcaagtaccaccacacctggctaattattttttttagattattcaaaacttataacatttccattctgttttgtaactcaaattgccaaaattgcctaatactggttttattggatgtgttgtctaccatcagcccttttaccatagtttagtttctgtatccctgagtttgttatttttattcatcatcttctatatatctggcttttgttttcagtattttcttcacagaatatttctttttttttttttttttgagatggagttttgctcctgttgcccaggctggagtgcaatggcgcaatctcggctcaccacaacctctgcctcccaagttcaagcgattctcctgcctcagcctcccgagtagctgggattacaggcgcccgccaccacacccggctaattttgtattttaagtagagacagggtttctccatgttggtcaggctagtctcgaactcgcgacctcaggtgattcactggcctcagcctcccaaagtgctgggattacaggcgtgagccactgtgcctggccttcttcacagaatatttctgtggcatattttattcaccttctcatatttgaaactgtctgaaggttctcattttctctcccacacctccttccactatttagtcagaagaagaaacaaataaataaacctaccaaacttgtttctctctctagatttggggattttcatcagaattttcaggattttgtcaatttttccaaggggctgctgccaggtaaggcaggattcagtcacacatgtacttcttgagcctgctctcgggttttctcctttatcatccatcattgaccccagtacacctatgactgtgggcttgggctcatagaagcattttttttaccacatgttaccatgggacagcctgcgatttatagcacatatattgtttagtgagattgtttaaaggactgtatatactttgtccactcccacataggcttgagactagtatatttggtattactaatttggtaagcatttaatgagcatgaaccacctctcatacctgtggtaacggttaaatgaattttaagacacagtcacttttgtagtatagctcctagttttaacttgccaggtaagtcatgtgcttttattctgttctccagattatagaggtatggtagactttgaggatattaagtttgggctctagtctatttgttcaatgtactactcttctaaggcaaaactttaaaattgtgatttcacaatttctacctattaccatgtctagagatgtgacacatttattccttttgatatttctttctctttcctagccctcttcttgtcagatgtagatgtgcttatacgtaacacaaagtattcgatagaaaaatgggcaaagtaatagaaaaacagaatagagacccggaacagtaatcatcgttcaacccgatgcttcatcaggatcatgccaattaaagcaactgaaatattctgtgcctatcagagtagcaaaagtgacaaaatctgatatatcaagagttggtgatgtttttattactatggggttgatgaaagaaaaaagaattggtgaggatatagagaaaaaggactctcatatgctggtagtgggagtataaattggtagaaccactttagagaggaatttgtcctctcaaattcctcaaattgtatacagaaataaatactccacctctcagaagttccatttcagggtttacgttttagggagaacttcttcaaatatgttctcatgagaacatatttgaaagaattttcactgtagcattgttagttgtattcagaaattgaatacagctccattaatgggagagcagattacgtaaatgaaatattgtaaagcagctagaatgaatgcgtagagctacgtgtattgataataaaactcaaaaaaaaaaaaaaacaacgcccatccaatttcaggatagtggctgcctctggggaggcaggttatcagtgtagaacaatgaggaggcttcaggtactttagaagcaagaatactaacatttaataaatctaggtgatggatacagtggtggtctctataccaggctaatcaatcaaactttctatcctcatagaagtcttctatgactgcactgtaagtatgctcacacctgaaatgtagctagtatggctgaggaatctattttacttttattaaattttaatttaaatatccacttgtggctagtgccactgtgttggacactgctgctctgtgctttttagtgtgttaacacagttaatagtaactactttttttttcttttttgagacagaatctcactctgttgcccacgctggagtgcagtggcacgatcttggcttggtgcaacctccacctcccaggttcaagcaattctctgcctctgcctctggagtagctgggattacaagtgcctgccaccaagcctggttagttttttttatttttagtagagacagggtttcaccatcttggccaggctggtcttgaactcctgacctcgtgatccacccacctcagcctcccaaagtgctgggattacaggcatgagccaccacgcccagcctatacatttatttttaaaagaagatattcaagccaggcgtggtggctcacgcctgtaatcccagcactttgggaggctgaggtgggcagatcacgtgaggtcaggagtttgagactagcctggcgaacatggggaaaccccatctctactaaaaatacaaaaattagccgagtgtgctggtgggtgcctgtaatcccagctactcaggaggccgaggcaggagaattacttgaacccaggaggcggaggttgcagtgagccgagatcgtgccattgcactccagcctggatgataagagtgaggctccaactcaaaaaaaaaaaagaagatattcaatgatttggcaattctgcttcctagtaaattctcgcagatgtacttatgaagtcatgtgcaggtatttttgttttcaaaatctgtgtgattcctgaactgaggtaaaagtctggatagtaagaatatggagagtcaggaattctttctttttttctgactttcatgtagtgagatttaggatagtgatctgaattgtaacattgttttaaataggaaaacaactgtaaatagcctaaatttccattaatagaggaatggatttttttaaaatgtagcctgctaatatagtactctagagtggttacaaggaatgaagtagacttggatatagaggtgacattcaaatgacttaagtagtatgtatggcaccaacaccagccagtaagaatggatgtggaccacagttctttgttctctgctgtatattacctgggggagtggcttacaacaaaagctatttactaactagtattgagtattccattttaaaaaaagaactagtactatcagacaggcatacctggtgaatattcttcttatatgtatcaatataggagggttacagaaacatgctgagtgaaaaaagtaagatgcgaacaaaccagatgtgtgttagtttcttagagctactgtaactgaccaccacagttactgagtactgctgatataaatgaaagatacttagtgtcttctagagttgtctgagtaccacagctaggtgactcctaacaatagaaatttattgtcttctgtagcctgaaagtccaaagtcaaggtgtcagcggggccatgctctctctgaaggctctaggggaagaccctttcttgtgtcatcctagcttctggtggtcgcaggcaatacttggtgtcccttggcttgccatctatctacatcactccagtctctgctactgtcatcacatccttctctcaggaggtgtctgtctctgtgtctgtcttcctcatcttacagtcaccagcagtcatactgacctagagtccacattaatctaatgcagtctcatcttgattatatttcaaagaccctctatccatgtaaggtcacattcacaagttttgaatgacatagatttggggggaaaccattcattctaatacattatgtatggtactatttatgtgtactagaaaacacacaaaggaatgctggtttttggttttttacatatatatgtaggtacatatatgtatatatgcagataaagtaattgaaatggtctagagtatacacactaaactcaagatagtgtttgttcctccatgggggaataaagtgagatatatatattaaaaaatattaacagttggtaatgtgaattgtgggcatatagatgtcaattgttttttgtactttcccaaacatatttaatttttttaaaagagttgatattatataatgttactgtataatactctatcatatataacttatggaatttatttttgagagagtcttctctgtcgtccaggctggagtgcagtcactgcaacctctgcctccctagttcaagcgattctcctgcctcagcctcccaagtagctgggattacaggtgcacgccacctcgcctggctaatttttagtagagacggggtttcaccatgttggccaggctggtctcaaactcctgacctcaggtgatccatccaccttggcctcccaaagtgctgggattacaggcgtgagcctccatgcccagccaaacttttatattttttacttttcaattctaaataatatttaaccaccatgtagtgagtatttgttatatgccagcctctgagtggagaatgcagtcagggtgggcttatttgtaatgggggatgctgggtgatgtggggccagagagttaaacgagtgaaaatatgtgtacggaagccacctgtatatacttgtactttcaaacatattgacatgaaattgagtgtggtattcctttgtgtttttattcttttaatctgtttctgtactcccttctcattcctaatattgtttggaatttttttgctgttgttagacttgctagagaatgatctattttaatcctcttttagtatattatttagatttaattctgttttcctgatttcatggatgactgttgtgtttgttgttgtttgtattccatattctccttctcttgaattcttctggatttgtcctgctgttactgtgttgaggaggggcagctaaatacttacatgtgttgtggtgttttgttttttttttttctcccggagatggtacatgggtggttcatgctgagtttattttgcatcatgcttatgtggtagtttctcaagatgcagaattctagaatcataatgccttccctcaaaaatcttgagacattgttctgctgtccttcagatgtgtagtgttcaagatgggaactctaacattagtctgcttctttttccgttggtggtaacatgttcttctgtctggaagccaatggaactttctcatatactgcaaattcattaatcttgcgagaatgttttgattgtttttcatgatttttttcttggaatgttgaatgtttttcttttcctctcaaagaaattttctcatattactaattgttctgtttttcttctagtttatttcttctggaatttttaagtggctatgacgtctgcacttttctcttatagtttctgtggagaacttctcagtttggtccttcacatcacaaatttaattttccatagtgctcactctgctacgcccaggctggagtgcagtggcaacatctcgtttcactacaaccttcgcctcctggcttcaagcgattctcatgcctctgcctccagagtagctgggactatataggcgtacactactacacccggctaattttttgtattcttagagagtcatcattgggccaggctggtcttgaactcctggccttggactcccaaagtgctgggaatacagacatcagccactgtgcccagctgccatgatacttttataatcttaagcgactttgcttttgttctgtgattttcccttttcatagcagtctcttcttattttatggatgcaatattctgtcaaatctcactagatatactaatcagaatttttttaaaaaattccagcttcctaaatcctctctctttaattagaggtctgtttgctctccctgttcagtttcacagtttattatttatttatttactttataaagtttttattatgaacactatgaaacttaaacataattggagaaaatagtagcatggatcttcatgtagtcgttattaacactgtgctgttcttatttcatctacccactttaccctcagcaccttttacgttttgatttctattttttaaaacaaatcttccgtataatttcatgtgtaaacattttagtgtgttctttcagtaagtatggactttaaaaaatatatcataccattagtacattcaataaaatcaacaataatgtttaaattcttcctaacaatttattatttccagttatctttaaaatatcttctagagttgatttgtttgaatcagattccaacgtctactgcatttagttcttaagactcacaaatctatagcactctctccctatcccagcttattttaccccttatttgttgaagaaactgggttatctgtttagtaggattccccgaatttgtctttagctgattatgtatcatcacggtatttaacgtgttctgtcctctgtatttcatgtgcactggtaattagaagagagtcttgatttggttcagcattatcactttcttaggttgaatgtcttcacttggtggttttgttattcatctgtagttataaacacaagtctaactaacttgttttgcaaggtggtgggttcccccctctgcatttgtgagtggtggggagtctgctgtactctgtggatgtgtgcctcttcttaagagagagggcaagaatcagcccagcagtctcttcctttttcatgcataggtagagaataatgtggcacagtgactctccttgagtcacggagaaaggttgcaggagtaaccttaacgaaagagaacattagggagttctagtgctcggctgagcctgttggtttgttttttttttttgttttttcccccattttacctctttctttggggcagcccagatttggctgctatgctgcccagtattcgcacctgtctgccggcctgcctgcctatctctctctctctctctctctctctctctctctctctctctctctctgtgtgtgtgtgtgtctctctgtgtgtgtgtgtgtgtgtgtgtgtgtgtgtgtgtgtgtctatgatccctaggttacaaatctacagtggaaatgtcttaacttagaaaacagttcttgcttacttaggcccggaggtgtgcgccagagctgcctactctccacagccatggcagagcactggagcatctctccttgaagatctggactcatttgcgtggcctctgtctgtgctgcttaactcaccttcagagcaaagtcatcgtttatcaaaaattgtggacatggagtaattcttttgtctgtaaagcaatcattttttacttaaacttttcttccccattacagatactaaaaaatattacttggtattcagaacgagttttaactgaaatctccttggggagtctcctgatcctggtggtaataagaaccattcaatacaacatgactaggacacgagtaagtattccagctgctattctatcttttttgcatacagtacaattaagacgatagtttaaagcaatcccaatttttaggatgctaaaattctcgtgacatatggtagaaaataccggtcactgtatagtcactgtattacatgatcctaatgtaacataaggtcttaatatttaatggcttgtatgattggagatattttacatgaaatagaaaacaagcaatgcaaaacatttagataaaagctattgtatgtctttatttggccagtaacactgatttgccttttttaatagcagcaaataacaaagtacaagaggatatgagcacaagaaaatatgaattaaaatgaaaaagaaaggtagaagagagaatattttaaagagtaaaagaaaaatttctgctggattctcttcacagtacctgggagcaaatttcagttctggttaatagaaatatattattaaagagaagcagtgtacagaattcatagctaagagaaatggcatttttttttttttgagctacgattgtgccactgcccttcagcctaggctgcacaggagtgcagtggcacaatcatagctcactgtaacctccaacccctgggcttaagtgatcctcttgcctcagtctcctgagcagctaggaccacaggcatgtgccactacacctgactaattttttttttttttttaaatagccaaagtctcgctatgttgcccaggctggtcttgaattggttttgaactcttgtcctgaagtgatcctcccactttggcctcccaaagtgttgggattacaggcgtgagcccctactcccagcccattttcagttattttcctccgtggggctattgcagatacacattcatgttttttatctgaaaccctaggagccagctatgttttagaaagcagaagtttttggattttagaaagataattatagtttatatactctactatgtgtaaccattagggccttaagtagcatgctgtaattaaacgttatatttctgtagcaaaatatttcaatattcaccatggagggaataatgaagactgtcaggaacatcatcattttttgtgttgtggaaaaaactttgaattttcagtgctttatggatttaggaattagaaaaaagagatagtggatctgaactttctaaaatcagtgacaactgagtttacatttgcttctattaatagttaaccttggttaaaatatagagaagacttgattgtatgttttacacccgctgtttcctcacaggacaagtaccttcacacaaattgtttggcagctttagcaaatatgtcggcacagtttcgttctctccatcagtatgctgcccagaggatcatcaggtaaatatgaactttaaaagaaatactgatttgcctctggctgagctattaagatggatactatggtggttcctttttaaatgttacctgtgaggactatcaaattttcctacttaatttttatcaccttcttgtttggttgaaaatagctcgttccattttgttttctaacctaactttttgatcaaagttaattgtatttacattcaatctttttataaaatgtaattttaagtgtaatgttagttttttagaggagcaggtatatttcttagtaatgcaaattaaatatgaatgtatttgatgcgcattttatagagcatcacactacacttttaaggatttatctgtgtgcgttttagagaatttttatagcagttcacccgtgtattagtttcctattgttgccataacaaattaccaaaaattagtggctgaaagcgcaaactggtcattttaaaattctctagtttagaagtccactgtgggtctcactaggctaaaattgaaacagagctgcatttctgtctggaggctgtaaaggagaatctgtttccatgcctcttctaggtgttggaggctgcctgcattccttggctcatggccccttcctctgttatcaaagccagcaacagtagattgttgagtccttctcatacctcatcactctgacctcctcttgtggttccctcttccatgttgaggactcttgtgatttcctggacccttcctgatccaggattatcttccatctcaaagtcagaatcataatcacaaggtcgcttttgccatgtaaggtaacattcataagtccaggggattaggacatggacatttttgagggagccattattctgtctgccagaaacccttgtctcttccccacccattgccaaagacatgacttttttttttttttttttttgagatggagtctcgctctgtcacccaggatggagtgccgtggtgcgatctcagctcactgcaagctccacctcctgggttcacgtcattctcctgcctcagcctcccgagtagctgggactacaggtgcccgccaccacacccggctaatttttttttgtatttttagtagagatggggtttcaccctgtaaagacatgactttgaaggataggaaagctaactaaccagtcataagtgaatatcattgcagggctttttagcatatgggggtacttttttgacttcctgtaggatgttcagtgttgtccaagtaggtctcaaatagaaccccagtgaagtcatattgtttcctttaattcttacttttggggcaatgcagggtttctcttcttcttttttttttttttttgagacagagtctcactctgtcacccaggctggagtgcagtggtgtgatcttggctcgctgcaacctccacctcctgggttcaagtgattctcctgcctcagcctcctgggtaactggaattacaggcacgcgccaccacgcctggctaatttttgtatttttagtagagacagggtttcaccatgttggtcaggttggtctcaaactcctaacctcatgatccgcccaccttgtctcccaaagtgctgggattacaggcatgagccactgcgcccaggcttttcttgtttttttaaagacagggtttcactctgtcaaccaggctggagtgcagtggagcaaccacagctcactgaaagctcaaactcctgggctcaagggatcctcctgcctcagtctgggcatgtggttttgaccattcagttttgtttagcagtcattggtggtgataacaactccgtatcacttttaaatgctgatctcacattctcttcattggttagccattgattgacctgggctcatttttaacttactcaaaattaagttgtctgtttatcttcagaatttagtacaggatattttgcattgactcactatttaatttatgtctggtcttaatacattctattagattgttttttgggtttgtacttgagagatcatctagttgactgacattggaataatgtgaacttcacgatttaaaataaacatagcagtctcctcctaccttggagtttttcaggtattctgaagagcctttagtttccaggagttaacctttgtcaccatgctttatttcaccataacagagttaatgatttctgtgctgctttgtaggctgtttttctgtttatgtgcagttttataatggtttcatgaagatttcattacacaattaacttttctcaaatgataaatgaacatttagcttgtttgatatgaaaatgccaaattagctggttgataatttaagttctgataaaatacatttagcacgattaaatgtttttgagatgcaaacaattttctagttgggaaaaatgcatataaaaacactgtgtccaagttttaatctgtgatggcaaaagtagaaaataaaccaatcatatttgaagaaataagaaacatagtttagatttgtgatttgagagcatttagattgtttatcatcaataatgagtagtgctttacttcattttaatagattgttagttagcataatatgaataacgaactatgttaagcaatgcaagaagtatcaaaataaataataaagtttcctgacctcaagcagcttgcaattcagtagcaggaataagaccaggacccatctatgtgtgtatatatatatatatatatatatgatacaaggatcttttatacagcagaatgttatatgaaatatatattattatatcttaatattacaatgaaagaaaaattgctatggagggggtgaatggctggttccaagaatggcaagaaggcttctcattgaaagattaagcagggtggctacagaaagatgacatgatagataagagaaactggcctgatacagcaatcatcaactacaacaaaccaaagcaaaacaagagagggactatggtgagagagcatgatttatatgtagaaaataaccagtttcatggaactggcatgctgtggacctctatggggatcacaggtgagaggcctgaaagaaacagctggggctattactgtggaggggcttaagggttggactcacagtttagaataatcgaaaggaatggagagaaaagaaggtcttttcttaataacaacaaaaaagaaagtgtgattgaatgagtttttaagtggattttgaagaaaagaatttaaggtaaatttcttgagtcacctgtttgagcagatgatagtatcatggtctgtttgtcgcactgagggaagtgtagttctacccagctcccacatgctgccagcacttttcttgttcaaggaccacatttgagtagccggtgcggaccagagcatcgtgtcatgcaggagggagcttgttggaagtgcggagtgtaggtgtggcttttgacctactggatcagagtcttctttctaacaagatccccagatgatttgtatccacattaaagtttagaaaacacttttgagttttggcctggaaatcattatgtatttcctgagaaaatatttgtcttgagctggaaatgggggccagcttttttgtactttgaggaaactcatttcctactaaatatttgtgtttagggtatagaaatgtaaagtatgataagggatgcatgacaaaaactgtttagatacccagaagggttattacagcagtacaactcagaattcaccagatgctctagtaaccacttcaagtgagaagtaagcagttttcatatacatgattcctaaatcctcttttagaaagagactacacaattttatatttgtcagttgcaaaacttagaagagtcagtatttcacatgatcttcaacaaaatgcaaaacagataacatgttacattgctatgaaaggatgtggataaatctttgaaaagcctccttagctggacataaatgtaaggaatgattccttacagtacctaggctgttgctcatacttaatgaccatgtgccttctacagactcttggtgttctaggagaatcacagatctaatttgagttttgctcaactttgtaagtcttttggatatgccataagtgtgcatatttgctgcgttctttatttgggattatgaggttattgaatttcaagacatttataaagagtagattatatgcaaggcattgctttagattagaaagataccatttacttccagcccttaagactgtcccttattgtctctcatgtccctccactggctgtttcctctggcttctccttcaccctttgattaacaggtagttttctctagtatctcattctgtcttgttttcttctgtctttacacattttctctgggagatcacatatatgtctatgactttatctactgtcatttgtatactgaaaatcacctgataatggttaggctttgtgtccccacccaaaatctcatcttgaattgtaatcctcataatccccacatgtgaagggagagaacaggtggaagtaattaaatcatgggggcagtttccctcatgctgttctcattcatgatagtgagtctcaaaagacctgatggttttacaaggggctcttctcccttggctgtgccactcttctccctgccactttgtgaagaaggtgccgtgcttctccttcaccttccaccatgatgtaagtttcccgaggcctccccagctgtgctggactgtgagtcaatgaaacctcttaactttataaattacccagtctcaggcaggtcttttttttttttttttttttttttttttttttttttttgaggcaagtctcactctgttggccaggctggagtgcagtggcacaatctcagcttactgcaacctccacctcccaggttcaagcaactctcctgcctcagcctcccaagtagctgggattacaggtaggtgcatgccaccatgcctggctaatttttgtatttttactagagatggggtttcaacatgttggcaaagctggtcttgaactcctggcctcaagtgatctgcccaccttagcctcccaaagtgctgggattacaggtgtgagccactgtgcaagcctcgggcagttctttatagcagcgtgagaactgactataacaccacccaaatctaaattcataatctagatctttctccttcactgtactggcagacagtacaatgtagaggataagcacatagcctctgaagccagactgccagggtttgagatctcagctccagaactttactacctatggaatcttggtgatgatgttctttaccttctctatgcagcagtttcccatctgtaagacgggagcggcagcagctgctatctcaaaggattatggtgaggatgaagtgcgttgacatttgtaacggcctcgcacataatttgccctgagtaagcattagctggctgagcaccaaccccactaggttcaccacctgggtatctcatgcttacttcagactttcattatgtttaaaactgaactcgttttcaaacctactcttccttttaaatcccctatcctaggtaatggccctcaccacagtcacctaaattgccaagccagttctgtaacttttctccctttctctcaaattctatcttactggaccctgaagttgtacctaactgccattgtaatttgcatgtatatgctcttctctttctccatggctgctgtcttggttcacatgtgtgtcgtcttcacccacactatgccagtagtctgactgggtctttttgcctccctactcacccctgcacactgctgtattcactggaaaagcaaatctcattgcttcttttgcttaaaaatattaaatggcttcctattgctatcaggttaaaaatctgacctgtgctcttcactgtgattttgccccccaggggacatttgacaatacgtggagattttattgttattgccagaagtgggaaagaggttgctactgacatctagtgggtagaggccagagatgttgctaaacattctacaatgcacactacagaccccacaagaaagcattacccaacgcagaatggcagtagtgtcaaggctgaggatccctttcttaaagtgacatagtctgggccctgccctttgcccttcgtcttcaattgccatttgccatatacccactgcttctgctttactgaatcattacagttccttgctctttcacagctatatcgctgaatctagataaatgtggtctggaactagaaaaaagttgaggcagttctttgtgtcacctctttttttctgtaggtttttctttttcaaccagcttcccacccctttattccatgtcttttatcttgaacctgcagtggcttcttcaacttgctgaggtctccccagttcagctcctaggccttttgtttggaccaagctgctgctaacatagttgtttcatattccccattcttcagattacaaagagaaagaacccatttggccctcttcatctcttcgtagcagcccatggatcactgtcagtttctggcctaggggctagttactggggctagaacaggaaggaaagacccaggaaaggagaaagctacatgttagaagatctggatatggttacctggcttctttcagaagtaggtgtgggaaagatagaacttccaagtcttacctgtccagtgtaggtacttacaacatactggcctggcctggagttgcaagtcctgttgcttaagcagagtaataattactggagataaaagacttattttatatttctttgcattactttacagagagttgctctctctaggcacacaatagacttttaataaatagttagtgactgattcttagaagatgggctggcatctggaatttaaacttagttctggcacccactattctgagacttcatgcaagttgattagcatctggctatattttgcagatgtctgctgccgcttgaaactagtgaagttgatgatctggtgtccataagatgctttagacagtgccagactctattgaaagctttctgggttttcacacctcttgagaataaagtaatacaaagtatagattaggttttaattaaaacaattttatgagagcaatacagttatttctgataaaatttaatcatgcaatttaagaactttaaaattctcaaatccatgacttatgctttcactttttctcacagccatcaggagtgagtatatacacttcagattttaagtgtatggttgtgcaacttccgtgtagtagtctcaagctggcattttatatgagttgccttttcctgccctgcactcatgatgacacatattttaatcacccagcatttttttgaagactacaaaacagaagttggttgttgaactacgtggtcagctcctctattttgggcaaataagatcttttagaccattcaggctcatggaattaaagaaagaaagacaatttgcccccagccttcatttaaataattctttaatagtaacttaccccaacaggcttcctcacttctgttcccactgaattaagttttcatgggtttttttctcaaacatgaaagggaatattaataagcaaattgacctatttgttgggatgaatttatattacacacacacacatgcacaattcaaatatgtaataacataatatatgattatgataattttagaaatattgccttattttttaaaaagtccatttaatgataaatttatacctgccatcctcagtgtctcaccacttatctctcttgtgttacatttaaggctagttgaagtctggaggtttagacagtcgagggtattgactcttcacagctggtaagtggctatcccaggtttgtccagatcaaaagcctggctcactccaagaatggcagaatactctttctgagagtgactcgctcaccatgggaccatggatccaaactcctgggattgatctggaacagacagttctctacaatctaaggtagccgtgcccttggtggtcattcagtttgctttcccctagccctgattccacctgcctcccaatctatctaagtacctaaagttatagtagcaaagacaggaaggtcttttccacttttttagaactgacatgtttgagacaggtatggatgtgttcaggtattacaatacatggtatgtggaaattatcctggaaaagagtgataagaactgtgtgtcttttagcctgagacaataatattttttatatctaatccttgatattaaactttatttttaatttaatacttatgaatgcctaccactgctgaagtcctctttaagatatgtttttattgcagacgaatgccatttgttgtatctagaaattaagtgttatagttggtttttttttttaaacttcgattttatttcaacctcatattattgttagcactgtagtcaggaaattatttctttagggaaggaattatctgatggtaagaattgtaatgaatggttcagttctgtttccaaaaccttgctgagttatttaacttatttttcatctcttgaatgagatatcatacctacttcatttgagtggtgtaagagttaatgatggcttgtaaagtcttgcatctctattttctctattatagtattataacatttttgagatattttgaatctaaaaataaatctggataacatctctacaaaagaatgtattggtctctgctaatattgcaagattctgattccctgcccgatggatttttgaattgcctatattccccaaatatttttctaacaaagaaaatgaagatctcactgaacatagatagaagtttttaataattgttttattgtagattggtaggagatctgagcaatggcttgcagtataaatacttctcttaaatgtatatgatttcattttttaaaagatagaattagcttgctcttgcccaatgcccaggcaataaaaaggttccagtttcttcattcctttggtctttgctgatccttgtttgatcttggcatagcagtaaccaggaaaggaaggaggaatgtttgtcttgaaaatctggcttcctgtatttcctacagccagtggtactttgaaggcagctaagtttttcagggaaatctggcttggtttgcttttttagtttagtcctttcttaaggagttacattgagaacatttagacagctcctctctgaaaatttataagtttccagtagaaaatggttacctattcaaaaaattgctagtattgtacaacagggtgtcttggcagacttgatgggacacaagaaaacttcataattggtttaatttcagtttagactgctggcacattcaaaatgtcagctttaaagaaacatgtcatatgtttatcagattgtttatttcttataagtaaagacctttgtggacaaaattgccacacagcaaattaaactttaaaataacttccatagagctttattgaatgtcaccatcatgttacagaggtaacttggtgtggttcaactttgtcctcttagccatgaattattaagcctccattcctgtttatttttatgaaggttgtaagatttttacctactttcaagctaacaagtttacctgctacagttttgtagattctggtaggacacccaagactcctgggtcaaggacaaaggacagtttgttattgtcctttttttatattttttatcataaattattactcgcagcagtagtaggagccagaatattcatttcttgtgtggttcccatacccacagggcaacatgacaagggccaggtgacacctgtaagtgcagtgggttgcaatacaggagcggaacccagagcttgggaatccccagtcttttatgatagccttcaagcacacctgcccaacctttgctttgaagggagacatctttaatgtatttgatagtaaactactctctgctctagagagagacaccatctctgtcttccaagtctgttcactctacaagcatccacgcagagatagcccggagcacaaggctgctaatgcctctgcttttaagatgtgcaaaacatgagagagtggggaattgtctcccaacactccttacctagttatgaatttctgttgccattggaaaaacctgtcactgtttcagtaaggtagccagttgatactgctctaggttttatctctcagttgctaatgcattgtatttaaatatcttagaagaagcaaaggatggaatggcctcattcctctttgctttgtacatgtgtcataatgaacctccaactcagatgtcagtgtcattaactccacctctaaagccttatttacaagtcataaaattatagacttagaaggacctttaaagatcatctaaggcaaatttccacattttacatatgggaatattaaaatctcgagttatgtgaccagtccaagtgaacactgttgcagaagcagacaaaaaaccaagtcatctaggttcatagcctagtatttttcccagaacagagagaaaagaggcacgctttctctctgtcttttacaaaattgtgatatttgatatgttataaaatgctaaggccagataagaaaaatagagtgacttaataaagcattttccttcttgatgaattgcatgtgtttcatggacttttaaaaagtaccttttccaagacaaagaaacagtgttgtgttaacaggagaaatgggaataaacaaaggtaaaaagatttaaagtggctcacgtgtccaatgtaaatacatactgaatcagatgttgcagagataggacaaacaagggaagagagaatgcttccttaggagagacaaggatagtttggaaaagctagctttaaaaaggtaggtagataactccctatcacaagtattgtgagttttccgagcatttacaatttgttcatttgttcaatgtccttcagtttcctcctttacaaactgggactactgtcctagggccactgtgaagactaaatgagttaatacatttaaagtgcttagaatggcatctgctgaatagcagtcacctatcgggggaaccagcccccaatatttcaatgtaggttcttttctatttttcctaagtgtcggctggtctgagaaataaagagaaagagcacaaagagaagaattttacagctgggccgccggggttgacatcacatatcggcaggttctgtgatacccacctgagctgcaaaaccagcaagtttttattagggattctaaaaggggagggggtgtacgaacagggagtaagtcacaaagatcacatgcttcaaagggcaataaaagatcacaaggcaaaggcaaaattagaattactgatgagggtctgtgtcccactgtgcacacattgtcttgataaacatcttaacaggaaatagggttcgagagcagagaaccagtctgattagaatttaccaggctggaatttcccaatgctagtaagcctgagggtactgcaggaaaccagggcgtatttcagtccttatctcaacggcataagacagacattcccagagtggccatctatatacctacccccaggaatgcattccttccccagggttgttccttgctgggaaaagaattcagcaatatttctcctactcgctttctgcaagaagaaaaatatggctctattctgcctgaccccacaggcagtcagaccttatggttatctttccttgttccctgaaaatcgctgttattctgttctttttcagggtgcactgatttcatactgttcaaatacatgttttacaaacattttgtacagttaacacaatcatcacagaatcccgaagtgacatacatcctcagcttacgaagatgacaggattaagagattaaagtaagacaggcataagaaattataaaagtattgattggggaagtgataaatgtccatgaaatcttcacaatttatgttcagagactgcagtaaagacaggcataagaaattataaaagtattaatttggggaagtaataaatgtccatgaaatcttcacaatttatgttcttctgctatggcttcagccagtccctctgttccgggtccctgatttcccacaacagttacccagtaattatcaaaggaaaaagatcttccttgttagagggctcacagcaccatgtcttgttcttgatggtgcagtaggtatttgaatgaatgatgaaattctgatacttgaattgagctaaaacaaatggttaaaatctactggctctataggtaaggaggaaccagtgtgcctatagactaccttgtttttgggtttttttcttcttcttcttctgtgaagctggtatccgtcacacacatactggatcctatgcaatcggttatttgtgttatccaataatatgagtattatttatattttataatgaagaaactaaatgtcagagaagtagcttgtctatggacagtgacaacattggtatttaaacctacacctgtgctctgtctacaacaccttcctttgccagtgcttcttataagtgaagttttaaattaaaaacaagtaatttgtgtacttggtcgtttaatataacactttacttaggggcagttgttgccagtctttctaaacatgtgatccccctgttgacatgtttttaaaaactcattgactatctttcagtagttactgactgaaaagatttgagggtgaatagtgggggtcccagacaccctgtgacagatggtctaagcagcttttcccaatcggagttcatgagaaaatcaagtccagcggagaaccagttaagtgaggatttcctcagttctcccaaggagatagtcatacgtagcaaataccctctaaatgagtaggagagaagttagttgatgacaaaacttttgccttcttaggaatcctggtttaaaagatctgtgaggacttcggggtttgaggtccactggttaagaaaaattactataggaactcaatgtgacactcctcctgttaatgacttttttaaaaaaaaatctaaaatgtgcctgctttcttcattagtcaaacatgaagattatattgaagcgtaagagtatttgtctattctttactgaataaactttcatggacccattagtcctggaaattcagaagtatatacaactctgtcataacttactgcctgatatcgacataataatggtatctgagtacataagccaatcagagaccttcatagcattatgaacttccaatttaggatcactcagtattaaatgaatcactgagattctaagtatgttctctgaaaaactaaagagactggttctagcaatgattttttttttcttttttcttttttttttttttttgagacagagccttgctttgtcacccagactggaatgcagtggcatgatctctcagctcactgcaacctccacctcccaggttcaagcagttctcatgcctcagcttcacaagtagctgggattgcaggcacataccaccacaccttgataacttttgcatttttagtagagacagggatttacaatgttggccaggctggtctcgaactcctggcctcaagtgatccaccatccttggcctcccaaagtgctcatattacaagcgtgagccaccacgcccagccctaacaatgatttcttcgtggagtattttaaacaagagtaggtatttaggggacatataatcatttatcagatattttctgtgtggctaccatgtgtcagacatctccaggcattggcaattcacaccatagactcatgctgtcttcagagagcttattgtctagcaggctctgtgttttactgtgatgaaagtgggacccaggagaaggcagcccgctcacctgagtgtcacggaagccttaccagtgagatgattgatgcttgagttatatctgggaagaggagcaggtctcctcttttaaagtagcgaggaggcagctcttttctctgtccatctggctcttggccgttccctaagcttcctttagaaaccctaggtataggccgggtgcggtggctcacgcctgtaatcccagcactttgggaggccgagacgggtggatcacgaggtcaggagatcgagaccatcctggctaatacggtgaaaccccgtctctactaaaaatacaaaaaaatcagccgggcgtggtggcgggcgcctgtagtcccagctactcgggaggttgaggcaggagaatggcgtgaaccccagaggcggagcttgcagtgagccaagatggcgccactgcactccagcctgagcaactgagctagactccgtctcaaaaaacaaaaacaaacaaacaaaaataacgctagttataacttgacgtttttgggtgtacttccctttcagtgacctacagaagacgcaaaacttccttcatcgaacttgactcccacaaggtgatgaaaataaaccatgtattaaaatacaacccatctagaggctgtgtgtcaagctgaccttcatccaattttaatttgttttcttactcaggaaactttatttttcaatgtatattacagttataagatggttgaaatactcagattactttatgcatttttattgttattattattttttgagacggagtcttactctgtcacacaggctggagtgtagtggcacttcccactcagtgcaacctccgcctcccagtttcaagcgatcttcatgcctcagcctcccaagtagctgggactacaggcacacaccaccatgctcagctaatttttttgtatttttagtagagatggggtttcgccatgttggccaggctggtctcaaattcctgacttcaggtgatctgcctgcttcggcctcccaaagtgctgggattacacccgtgagccactgcacccagcccagattactttaaattagatcagcagttctcagccacagtggaatggtggggtggggtgagagcaagtggagtgtaactccaggcagcctgtctgactcatctttgcagaaagacgcctgaagaacatgtgtggtgcatgttgtagtgctgggaaaatggttgataactcgcagcgtagaaggtgacttatcgtagaaactgaatttgtacattattaacttaacgacagtcgaagcataattattatagaagcctcaaatgagtgatcagctttttcctttttaatttgaaaaattcgaaatatgtttgaagagaattatataatgaaactttagattgtcagcccctaccttcggcagatatcagttcttgacaaactatttcatttatttcccctcctttttctccctaccctggattatttggaagcaattcctgacatcatttcatctatcagaattgcattatgtaaagaggtacatttttatgaatatccatttattatttggtccctctacaagtggtggagagaaaaataaaatcaggttaccaccatcttccaaaacatggaaattagccatagttttggtccttagtcatttagaatctgattgagttcggggcttactctatcactcatattgctagtcagtgttatatggatgctgtcttatttaattataagtctagccatctataaggtacagaatttctgtttaataggtgaggaaactgagactcagactgaaacttagccaaggtcatgtagctaatagtgtggagctgaaattgaaatccaagtttgaccctagcgtagaaatgttctttttggcagacctgacattgataaagctgaaaaggataggcagacatcatctaccttatacctgcactcagattctcagttgtgagtgagtagaatgtccactatataaagtttctgtgcagtcttggatcacttctgtgcattgattctcgaagtgtgttctgtgggccacagagagtccatggagtctaagccttttataataagacatcatttgccatttccactgtgctgacatttgcatcaagggtacaatagcaaagttggggtaaaactgctgagaccttagcataaatcaagtggtgcctaactgtactagtactcactatattttccacaaccacacacacatttgtggtaaaataaaaaccatcttcactgaaaaatgtccttggcgaaatagtaaaaatgattagttgttataaatcttgacccttgagtacatctttttgatattttctgttgtaaaactagaagctcacataatgcacttctactccatactgggttccaatgattgtcttgaggaaaagcaggtgtgtgatagagttgtgagctgaactagccacttttctgatggaatagcatttttacacgaaagaacatgagacagtcttggcagagaggaaactgccagtgttggttgccaataaaaaaaattttcaagtcaaaattaaaatttcgaaaaacttatatttggcatcatgagtttgacaacttcctaataatttagacttttgttataacatcaatgatgttagtaaatatggattttaaaaactattatttgatgaaatgtgtcaacatttggaagatctgcataattcagtgaaccaatatctctcaaatgactaaaggggctttttcattaactgtattaatgttaacatgtaatgtgtttattattaaatttaaatgaattagtaaatatttaatattttctcagttttaatatctgtcagtataactgacatatgaaaaaattctttggggttctcattaatatttttaagagttgaaaggggccctgagaaaagtataagaaccagcactctaatgccctttcaggatgagataggtagagtggatgtgagcatgtctgtattacagagttcagtgtatatacttttaaatatctactatttctgaattataccttccttccatcagtataatcaatatttaactatatttgtattattcatgcttccatttaataaatatttattgagaacatagttatcagaggttgaaagagaaggggtatacagaatatataaatcatgtttattctctgtaagagctcatggtctctattctaaaaagtcataaaaaaacaatgttactgtactaaattgccttttaagtttattgcttatcttgcctgggtgtggttatgaaataaatttgttgctgttgtctatttctgtgtaacaaactaccccaaaacttagtggcttaaaacaacaatttgtaatgacctccacagggctttgggttgattgcttagctaactgactctctacttgtggtctcttgtttgccatcgtagagcagctgggctgggtgtccagtgtgctcccatctcaaggctggcagttgatgctagctgggagatctgttgaggtgttgcctggaacacctccaagttcttcttcttgtgaccttgctatgaagcttggcctcctcaccgcaacgcaggcaggttcccaagaggggacatcccaagagtggcagaaactataaggtttcttatggcctagctcagctatccctgaatgttacattttattggtcaaaagcaggtcacgagaccagcccagattcaagaggaaagaaccacagaagggcataagtgctgggagatgtggttcatttgtggccatctttggatgctagctgccacaagactgctaggagactgttgaattaagttttataaattattgcttattgtagctgggaaaatgaatactttcattcttaagatcaatatccaggcttctgttcaaaatagaaaatttaagctgaatccattcaaatgctattctttgcatttttttcctttaatttacatttgacattaacattctctccctgactttttcccatagtttcttctgatgagcaggaaatgtccactatctagtacaggtgtcttcacttatagtcaaaatggaagaggagcaagtgcacagagttcctgtaagatgcatgttcatgtggctgcacttgctggccactgagttgttgatattgaccaaatcttgtctttagtctgagaaaatgtagggctgtgttatcttgtggcagtgtggcaggctggatgttcactctgacaataacagctcaagttctatacaagagaggctgaggggcagcatttggagggtggagtttgagggttgtttgcaagtgccatttaaacagcattcacagtgtctccaatttgattatgtattcacagtggcttggaaatctggctggaggagtgtttctttttttttttttttgagacggagtcttactctgtcacccaggctggagtgcaatggcatggtctcagctcactgcaacctctgcctcctgggttcaagcgattcagctggaggaaatttgatagggagatgctttagctaaagctcccccttggtggtgctgttgcactataacttccaaagaaaacatcttttttgttgctcatttttttaagcaaacattttattggacactaaggtgcaccaggctctgtgctaggcttaggggaactaatacaacagttaatatccttatagtctaatcctggctattaactttcttaacatcaagagtgaagaaataatattattatatactattatattaaataataatattaatacatagctaattaattcaagccagatccattgctgcatgtagacactatggaggcagtaaccaatttgcctaaagatgatgcattcacaaatttcacaattttaaaggttacttaaaagggtatcacatagctcttaaatatagcttaaaatgcacagtttaagtctaataagaaaattgcagtttaaaacttcactgacatgctatttcttacctatcagattagaaaaatccattttccaggttatgtggaaacagaccgtctcaaaattttctggttgaagtgtaaattggtacaactcctatgaagaatgtggtaatatccatccaaatttcaaataacatcaccctttgacccagcaatcctacgtgcatttgtgcaaaatgacaatgtactagtttattttgggagtattttttataatagcaaaagattaggaacaactcaaatatccaccaacagagacctacttaaatatggtacattgatctagtagtgtgcagctgtaaaaaaaaaaaaagagtaaggtactgatggaaggctctttcagatatattacgtgaaaaatacaagatatgaaataatacatgtagtatgtgattagtgcaggggaaaataatatttgtttgcatttatctttgtttacatgcagaaactctggaaggacacacaagaaactgataaaagtggttatggggtgggaggagagctagccttttcactgtgtatgtttttcctctcatctcttaccatgtaagcaccaaaggggcagtgatctttatttttttcactaatggtatccttataacaatacatggcacataaatatttttagaataaatgattcaaaaataactcaaagaacaaaagtaacataagctgattacaaaaaatagagacaaacttgaagccaactgttaatataatgtctgcttccaagtaatccttaaattgatgtcttgttgtataacactctagatgattttctacttgcgtatatgcaatttaaaaaaaaagttttataggcattttccataatataatctatgttgaaagatatatggcctcaaaatatcattgaatttatccagtgaatattgctaatgccatatattacgacatttaagttgtttatataaatgcatgtctagacacatacaaacagctctggaaagaaaatattcactcatgcatcagagacagtgtatgacagtgtgaacactggaatgggagacccacctccatttcttgccagccgtgtgatcttgggaagttacctaacctttcagtgtgtacagtcctttagtacttgtcccataaagtgattgattcccgggttccaagcaggagacccttatggataatttgcttaataaaattgagcatgaagatacctggataagcaactgcaggagagtttctctcttcaagagggtagggctaggtgaactgctcccagatctgatgtgtgtcttgagcttcgttaagcaacaaggaaaaagactgaaagtctagcaggagcaagttcaagatgagggaccactgattccttggttcaccttgctaagttatatttgcaaagagcagatggtttggactaatctgactctctcgtgcatgttgttttcatcctctacctcagaggctgggagttctgcaggcccggctcctacggagtggccttttgggagcaagttcacattttcctatttacttacgttgttatttttaaaagactttgttttcatttcccattgttaattggctcttggaatttacccctgcctatttcccttcctgaatcttgccatttataaagcaatttcttctttccatatattagttttcctaaagtggggtatatttgatcaaattcaaatagttctgaagtaccagtaacatgactgagaatggctatttatttatttatttattttttttttttgagacagagtctcgctctgtcgcccaggctggagtgcagtggcacgatctcagctcactgcaagctccgcctcctgggttcacaccgttctcctgcctcagcctctcgagtagctaggactacaggcgcctgccaccacaccctgctaattttttgtatttttaatagagacagggtttcaccgtgttagccaggatggtctcaatctcctgatctggtgatccgcccatctcagcctctcaaggtgctgggattacaggtgtgagccactgtgcctggcctatttacatattttttaaaaatttgtaaatgggcatttcgcaggccattctcatataagagggagaattggaagtcctttgaaatatgttttttaaaaaggttttaatttttaagttatccaaagtgacacctgtaatgtgaataggacattccagaacaaaaaagttgaaacaaaattatcagtgttttatacaaattttgtactccttgtgtagctagaaatcaaacgtttcatattaaaatgagaattgaattagtttaaacaagttttgtttgcagaagtctctgattccttatgaagaggaaaagaatatgaaaattttatagtattatgtttttatattgcacttacaaaattgagtgaatattgtgtgatgatcgaaagattttaggcattttttcaagccacagttttttttttttctttcacagtgatatatggtacttactggaaattttacttttatttcctaccatatcatttgcacctgttttgctggtgtgtgttgattggtcttattctatctcgtaagtaattactgaccctgactggtctagacactgactggtagcagtgtaatctcaggccacttaaaaaaggactttcttaaaattgggccacagactaaatgttattaagtttgaagtatcacaccatatctttgttgcaactaagaaagtgaaaataggccttattaaagtctgtttaacttatatcattacatctattttaaatttttttcacaacttgaatagtatttcactttagcttctgttattctttagcttttgatcatgatattgctatgtgttgaaaggatttcatcaggtgtatcagtcagatttaggttcaactgtgaataagagaaaaacctaaaatctgagtatcttaaagaagaaataatttcctctatctccaggtaaagtccagagcagtccttctgagactgataaggaggctctgctccagaaagtctgtattagcttccatttgctgctgtaacaagttactgcaaacttaactgcttaatcaacacagatttgttatcccacaattctgtagatcagaaatctgacttggctctgctggtttctctgttccaggtttcacaaggttgaaatcaagttgtaggcctgctgggttcatattgggaggctctgggaagaatctaccactaggctcattaaggttgttggcagaatctagttccttgtgattgtagaactgagttcccccttgccttcctgagggctgcttagctcctggaaacctctctctggtccttacatgtgggcccctgcatctaactggcacatcaaatgatgcttctcatgcttgaaatccctctgacttctgccacatgtctctgactccagacagataaagttctctgcttttaagggatcatatgattagattgtgcatatttggataatccaggatagtctcccggttttaaggacaataatcttaattatgtctgcaaattaccttttgacctgtaatgtaacatgttcacaggttccaggcattagggcatagacatctttgagcaggggaaattctgcctatcacacagtcctcggagactcacactcttttcagatgcaccatcccctaaccatcccctagggtttgatcctccttcttaggtccaggaagcatcttagttcaagccacaggataggggaggaggcaaacaataaaaagtgaagtgagacactgggtgacttttcttttttttgagacagggtctctgttacccaggctggagtgtggtggcacaatcttggctcaccgcaatctccccttcccgggctcaagcaatcctcccacctcagcttcccaagtagccaggactacaggcatacatcaccatgcccaactaatttttttctattttttgtagacacagggttttgccatgttgtccaggctgttctcgaactcctggactcaagcaatcctcctacctcgacctcccaaagtgttgagattacaggcatgagccaccatgcatggccagcactgagtaactcttcagttttgttgttgttgttgttgttttgaggtggagtcttgctctgttacccaggctggagtgcagtggtgcgatcacggctcactgcaagctccgcctcccaggttcatgccattctcctgcctcagcctcccgagtagctgggactacaggcgcccgctaccatgcccggctaattttttgtattttttttagtagagacgggatttcaccatgttggccaggatggtctcgatctcttgacctcgtgatccacccgcctcggcctcccaaagtgctgggattacaggtgtgagccaccgcgcccggccagcactaactcttaatgaaggttctcagaagctgccaggagaccttcaatctagcaatccagaattcaccatgggatcatacttaacagcagtggaagctgagaaatatagtctttattaattgcagccatgtgctctactaaaaaaaatctgttagtgtagaagaaagggagaaatggatcattggggaacagtcaacagcctctgccccaccaagtgcatttatctaatcattggaaaccagcaaactggagggagtgatagcacaactactacattgtgggagtggagcaacagcaccatcataggcaagttagagggacatagggttagattgaagagaaatctgtcatgtaactacatctgaacacaaagattttatacctgaaagagcatctagaagctatttcatctgactgaaaaaatggatgctttttttttcatctgactgttctgcgaaaggtgttttttttcttttttttttttttgatggaatcttgccctgtcacccaggatggagtgcagtagcttgatctcggctcactgaagcctctccctcctgggttccagcaattctcctgcctcagcctcccgggtagctgggattacaggtgcaacaccaagtccagctaattttagtatttttagtagagatggggtttcaccatgttggccaggctggtctcaactcctgacctcaggtgatccacccgccttggcctcccaaagtgctgggattacaggcgtgagccactgcactggccgaaaggtacatttttagatattgtattaaatctctgctagacacccccacagtttgtaaccaatccatgtatttttgtattatatggatctttaattcttacaacatctaaataccttatctactgaaagggagtgtgaaagtacactttaagtataagaaattccgtttcaggctgggcatggtggtcactcccgtaatcccagcacttttgggaggctgaggtgggcggatcacctgaggtcaggagttcaagaccaacctagccaacgtggtgaaacccggtctctactaaaaatgccaaaattagccaggcgtggtggcgcgcatctgtaatcccagctacttgagaggctgaggcaggagaatcgcttgaacccgggacgcagaggttgcagtgagccgagatctcgccactgcactccatcctgggcgacagagcaagtctgtttccaaaaaaaaaaaaaaaaaaaaaaaaggggggggggtccccgccccaaattcggaaccgggggcaaagggggtcccggggggaannnnnnnnnnnnnnnnnnnngcctgcttgctgaccgcagcttactctagagaatcccccgtataagaaattccgtttcaggctgggcatggtggtcactcccgtaatcccagcacttttgggaggctgaggtgggcggatcacctgaggtcaggagttcaagaccaatctagccaacgtggtgaaacccggtctctactaaaaatgccaaaattagccaggcgtggtggcgcgcatctgtaatcccagctacttgagaggctgaggcaggagaatcgcttgaacccgggacgcagaggttgcagtgagccgagatctcgccactgcactccatcctgggcgacagagcaagtctgtttccaaaaaaaaaaaaaaaaaaaaaaaagaggccgggcacagtggctcacgcctgtaatcccagcactttggaggccgaggcgagcagatcacgaggtcaggagattgaaaccatcctggctaacacggtgaaaccccatctctactaaaaatacaaaaaattagccaggtgtggtggtgggtgcctgtagtcctagctactcgggaggctgaggcaggagaatggcatgaacccacgtggatcttgcagtgagccgagatcgcgccactgcactccagcctgggtgacagagtgagaccccttctcaaaaagaaaaaaaaaaaagaaaaaatcaaaaaagaagaaattctgtttcaatcaagtagaatttccgtatggccagctaatacagaaagtgataaattgtgcaaagtatatgaatatggaaagtggggggagcaaatagttccaaactaggataaagcagaatacttcataacgtacctgtctttcaaacaagatcttatcggatgaatagtatttcagtaggtaaaaggcaggggaacatgaaaatcacatgtgtaatttagaaacatcaacagatggcaagaaaaagaattttggaaggtatatataactgaatattattataaaggaattacatgttttaaaattttttatctatgaatactaagttttcttgtctccaacctgtgttccttttcttgcctgcagaagtaaaatcagatacagacgttgcagttttaagagtcatgttgatgtgaccctcttcaaggctagttagtacttacagtttgtatttagaggaatctttgactaagattcctctggtgactttttagctccagatgtgctagtacactacgaagcattgtaacagctgtttatttcattagagttggatctagactgccactacctcagaggaaccagatacaagtagatccactccactttatttgacaaaggaaacatgctgatcctaataaccaaaaggaatgtggcaactcgttcatgtatttcagtatctttcacataggacagtgtaactgtgacctgcattttcacttgggaaagagtcctgggaaagacctaagagaacttaagctgttcagcagtggctgcatacctttggaggcaccatcagagagatggatggaaaattgggtaaagggaggtctacccccaaatccaagattctgtgattctgataccttttactttaaagcaatcattttcaggttctgtgttttgttctcgtactctagatctcgtgctttctttgctggtgtcaacatgagcagccaccagctgctctgggatacccactctactcctcccagagcagctcccctctgctttgatctgtttacacgttgccatttcacatcagctttcattggaagaaagggttccattgctttaaatatatgcatacataagcgcatacatatatgaataaataagttgaaaattagaaaaccctttttaaaggatggagtaatgaggttgatcttaaggttctttgaacttctcaaaaggcagtgtagtagtctaagctaatatatctatctaaaagatgaatattgtgcattagaaaaatagtattcttttagtgacattcatgaagtcattttttaaataaataatggacccatttgattatttaagctctatgtgcattttaaagtatattcatcgtgtagaaatactcttttttgccttttacttatttctacatataggttattgagtttttctgcatggttctgtatctcttttgttctctgccctctgcagaattttatctgatagtagatagaatgtggattcttaaggagaaaatctgttttattaattataaggcgtatgtctcagactaccaaaccaagtatactgagtgttttgaattaaatatttagtgcttcattgactatttcctctgacttccattaagaccttgagaaataactcttctctaataagccttttgtttgtttggggccaatatacagattgatgtggaatgaaccattgctgtagtatttagggtgtggtaagcttttctcaggaacttatctcatttcagtatagctcatttttggtaggatattaacaagtctctgtcatggcaggaaacacttggttttgttcccagatgtctgatagtagttcttttttgaggtagtaagatttttttggatgctagcatgggaaagacatgtgaaaagtgtagagagattataaggggcttgatatcaaaggtttttaaagacaaatggtctgtgcttgaacaggacattagaattgagcttaaaatctataacctaattttcttcttcccttgaatacagttggtatattcgaccagcataggctactgcttcaccttagtgactgttgtttttaatttgttaggacactaaaaaatgtattacatgtagaaaatttcccttttagtaaatagttctttgagttgacaaacacatatagtcatgtatttaccaccatagtgaagataatatgttcatctccctaaagattccgctgtgctgctctgtagtcaaaccattcttactacccaagcccccttctgttatttagttttcctttgccactttgtcataaatcttatcatatggtatttagtcttttgagactggagatttatccatgttcttgtgtgtatcattcgtttttattactgagcaagtattttattctatggataccacagtttatccattcactgattgaaggacatttggatgttttcattttggggcaattatgtatgaagctgccataaatatttgtgtagagaattttgtgggaacctaacattttcatttctcttgggtaaatacctaggagtagagtttcttgggcatatgtaattgtatgtttaactttataagaaggtgtcaaagtattttccaaagtggccataccattttgcattcttgccaacaatatatgacagttctagttgctccacatcttcaccagaaattagtgtttgctttttgtaaaagccattttaatagttctgtggtgctcactcatggttttaatttgcatttccctaatgacaaataatgttgagcatcttttcatgtgttcttttgccatccatgtatcttctttggtgaaatgtctatttagatctttatcctttttaatattgggttgtttgggtttttgagttttgagtgtttgagttttctttatatattattttggatacaagtactttgcaagtatgttgttttgcaaacatttatttcttccaggctgtggcttgttttttctcaacatttcaaataatctataattcccatttatcatttttcccctgatacttgtttatagaccacagtactttattttgtccctgttcttatacctcttattgttatagatttattattttgtctaatagatttattatttgtcaagtaatttggaattattagattaattattaggttaataaatctaaaattagttttattatttgtcaaataataaataatatagaatcattttatgtcttgttgttttcgtgtttaacttttagtaagtatgtgtatactttacatcttcaactagattataaactgatgagtaaccattggttaattttcttaaaaattatgtacaaaatagagataaagggaacagttgaataactaataactgtttattcagatgtgagataaataagaacctgtgtccttttcatcagaatttaggtcttctttggacccagttttcaccttctaggaatggccaccaaaaatgcactttagcttgtcttcctatccacagtaaacttcctcccaacccccatcatgatctctttcatcgcacctcacccatttcctatatccaacagttacaacttttacctgaaaaaggataggtagccttcataagggaccctagttctagaggttggtagaagtattgcggattttgatttaaaataatctgaaataattcatagaatgaataaagtgataactataaagtcttcagaactatttcagtttggccaactgtgagattaatcatgttattctagttctctattctgctggaagaaaatagaaagctttccttttggctggggaccagggatgattataatgattgaatttttctcacttccgtctgcaaaatgtccaaattgtggggttttcttaagattttaagaaatgagcagttaagaccttgggaattattgtgtaagttcctgttgccagtgatttataggcctttgcttactcctaaggaaggaagtaattttatgtttatggttatgactctgaatcccagcccagcctaaattgtgcttgtcagtctaatataaaggtaatgatgatgcatagaactcccatacataagatgacttgtggatcattgaatatggaacattagtttttgtccatttactccagttaataaatatggtggtttcttatgccaagcactatagtgggtatagagaaactaaaataaaaactcaacatctgccctcaaagattctatgattattgagaggggagatagacaataaagccatttacaaattcattttgtgaagttgcatgttggtaggaagcataaggcacagtgggaacctagaagggagagcaccaaaatgtgcatgtagcaatcggggagggcctcatagaagagtcacacttagtgaagagtaggagttttccagaggatacggagattgaagaagtatctccagatagtcagcagcaggtgcaaagaccagaggcaaaagactgcatagcttgtcttttttgcttggagaagatgctgaggtatatgcctcagtcactatggcagtcaggctgatacttcaattagagtggttagaacattggactggtgagaccaagatcagtcttttcatctccacccatccacctcagcaagcttcaatttctgatgactacattcctgtgacagacagctcccacaatcctcacctgccagctcacagatgtgggtttagtgtgtatcaccacacccttctgagtacaagggtgagagactgtggatgtttccgtgtatatccatgaccacaactgaaaaatgactctgagatggtcttctgataatgacttaatggcataatttctgtgtatatatatgaaaacttgttcttattttaatgactccaatagactttaaactcttaccgttatgtagcattttatcttgtgtgtatttttactgctctgctatagaaaggatatgacataaatatttaatcactctcagcagaattggccttatttcatggctccagattatctaacttcactgatctaatatttgtggcatggatgttgaagaatcataacttagagctcagttttttaggaagaattttataatggctataaatcgttttgccaagaggcagtttgtacaaaataatgactttaaaaatgagcaagctttttgatgatcataaaatgtgctgaatgtgctattttatacctgtttatttgtgaactcaatttttccattacattcttagtgtttatgcctcagattattcagtgcagacagatgggtgtggactgaagaacagttttgattttagcatatagtcatcattcatgtcccccaaagtctagatttttttaaaacaagtatcttaatttctctggatgacattaaaaggtaaattgtaatattttcaggctgaattatatgtctttgatggctatttttgtaatgagcatgtgctttaggtctttttttcctttagtcaactgcattcccactggaaccaatttggcatctgtgggagtcatagttttaatgtgtgctctgtccatccaccatttcctttggtacaaagaggaacataatgacattgaaatgcttctttcaaaatgtaagttgtaaacaaatctaatcaataaattattttcaagtaaattttgttcttatgaaatctccattagagttcccttcaccctaactctatattcatcacaagaaagtgccagaaggaaatttcaaatgaatgtctgcatttgtggagttttagaccttgcttattagaccacaagtagagtagacagcaacatgctattaacacattgaaatacaacttcaagccatatagcaaactgtgcattgctgggaaccaagccagcttcacattgctgcatggccatattgggcatttgcagagcaaatgtctgtagtggagagccatgacaacattctttttaaatagttgctttgtccgaagtcagaagacgtttttcatccacataccatgtaggaaggaatgctggtaataaattgatctgtttatctacacctgtaaatatagatggtacatctgtaaaacaagggacagtggtatacttaatgagttccctgtacattttcatctgttcagtctcggaattttagatacctggtgcatatgacttactgtttacaaaacctttaaaaactattttcaggtgccttgtcccctttgctttggtggtatatgataatctgtgcatttactttgttttctatgtggaagagaatgagattctgtaaactgtgatcaagtcttcaaagacaagttaaagttctcaaaaatattgttggaaataaaatttgtccctaagagataatatgatttttcctgtagctattgccaaatttatatctgaacctaataatatttacaatattttaaaatcagaaagcaagtaatttgacaaagatattataaaattgctatttaagatatttggctgttatttatgtttctacaaatgttcaggttttagatctttattgatgcacttatataccagaatgagtggctaatttaggatgaaagcacttattggaaggttttgaaatcagcagagaatatgattaaatctcaagtaccagtgatggtatacattttaattgattaaaaattgtattttactacagatgtaggaatttcttattctgaatttcttcagcaattaataaaacaactcacagaaaagatgctaatattgttatgttatattgtaaagaggttcattattattattatagtctctattattttataaatctggcagtgggatgttaggtcatttcatcccctttgagctagtactagattgttcccttcaatatattttccagtgtttcagccagtctgttaatccttcatactagagattcccaggatgttcgttgctggcagtagattcagctccaggaaaaatggcttctgctgccaaggaatgaaatgattcaagggttgtgcttgcaccactgttgtatagtttcctgacattcattccagattttcctttgcttattttcttggatatgtaagttttatactgtgtaaaattgtgtgtgtgcacgcatgctattttataaatttttagtttgcaaaaatttcccctggaaacttaatgcatatttaatgcatgtgaatgagctaatcaatgggattaacgatatctcaggaagtcttacattcagattatgttttaatcaatggtatttttaatgttactaatgaaaagaattgttggtcaccagtgacctccatattgccaaatccagtggacattttctgtctcgtttgtcctttcagttgtatttgacactggtaaccactccttcatcaagataacctcttcttggtttcctcatcttctttatggtttttttggccactcttcaaaattctgtaaaagtttatctagatttgaagtgatcttgtgatactttaaatgttggcatttctcaaagtcaccctgtcttagttcgggttgctataacaaaatagcatatactgggtagcttataaacaacagacatttacttcccacagatctggaatctgggaagtcctagatcaaggcgccgactgatttggtgtctagtgaggacctgcttactgacccaaagagggcagttttttctcttgtcttcccatggtggagagtggaagcaagctctctcggactcttgtaaggacactaatcccatacatgaaggctgtaccctcatgacctcacctaatcctaatgccttcccgaagaccccacctcctaataccatcaccttgggggctaggatttcaacatatacatttgtgggggacacaaacattcagactgtagcaaccccttctcttttctctctctactcttttcctaggtgattgtagccactcccatccttacaccgatgactcacaaacatacatttagctagccctatcctctggcttcagacctgcatgtccaatcagatgactaatgtcatcttttgggtttatcagagacatctcaaactcagcatgtcgaaaatggaaatcttgccctttcccagagtcttttgatcctctttctctgttgccgcctcattgaatgacaccaccatttatgcatgccagaaacctgagagtcaattttgacactccctgtcacctgccatattcaattcattaccaagtcttgtcagcaaccacccctcaaatccattcattctcctttatcatcgccttagtgcctactctactgcagtaactctttaacaggtctgatgtcaactcttgcttcatcagtctccaaccagccaatcatttcaaaatgcagatctcatcctgtgactcctctgctatatactcttcagatacttcccattgttcctagaatgaaggcataattccttggtgattttacctacctctgttcttccccaaggtcagctccttacacattgtcctttacttttgcataggagacatgtttccttccagtctcagtcctatgtctgcctttttcctttgcttgtaattattttcctgcttatctttagtcatcttgcagatcttggctgaatcgttacttttatgaggaaactttcccttacctatctattcaggcaaaatctcatctatttcaagtttcatctgtagtactttgttactcatttacatcaatttgattatttagtttgtccactcaagaatattaacaacacttcccttaatattagctgattcaaaacccatattcacattatgcctgattatctttgaaaaaaatatgtttattttgattagttcaaatcaggattcatacaggatcccacaccacatttgattagtcatgtgtcttagtttttttcagtcgagcagaggcaggtttttgtaaatgaagttttgttagaacacagccatgcccatttgtgtgcatcctatggctgctttctcacatcagttgcagagttaagtgattttaagtgagacaacacagactgcaactatttgctacccgacctaagtttaagaaaaaagttgtgcagtaccccttgcttgcttttcttttttaactattcaactcacatctttgactagttggtcaacaggtaagcagtcttacagaatatctcacatttcagatttgtttgtttgcatcttcctgtgtccttcaatttgttccctctcatcaatttctattgtaaactgaaaattaactctagatgatagatcatttagatggaattttttggcaaaaatacttaatacgtgttcctgtttatttcatattctatcatatcaggagatacataatgtctagttatcctggagatactaagattgattggtaggttcagatggtgatagctaatcctttcattctaaatgtcaccatcattctttcatgtgactttcatttgactaaacggttttattatatattgccaaacggcaaatttctagttaccatattatgtgcatatttgtgacatagagtttttctgtaaagaagaattttccttcatccactgtgtaatcatagttggaaagaggggagtaatgcttaacttcttccttttaatatttaattttcaaaactagagtttcatgcctttggtccctctagtagtaattgatacattttcattttttgtttatttattttattatgaacctctgttcatattgtccatatagattgtatgtttttgatcagtcgcagagcagttattctttttggtttctgattgtttcatttttggccattgggagatcccttatgttgcctcttatgtctttttgacaggactgcatttatctttgacagtttccttgcttccttccttgcttttaggccaacaagatgtctcaaactcatttgtattaaatacatttcttgtctcggacctagaagccacagcgttgttggtaggtgataggatgctcattattgaggagtctgtaattttttttaggtctcttcaatggacaaagctgaaaagatataaattcttgtaaagaaaaaagattatactcttagttctaattcaaattttagattatttaacagaaattctgatttgcttttttgaataacataaatataatgtttttctctttattctgttccgtgtatgtgtatatagttgtttcacaatattataactaattttaagtaagtgaatgaagtttaggatttttttgtgtgtgtttctatttgtccttagaatataacccactgagtatataatgtcatttctacattttaaagttattcaaaataatactttgtctagtttcttttttctttctttttttttataaaataacagtacttttatccaaatgaccaaataaaggttgctgcctgattctcaatttttttttaaattttattattattatagtttaagttttagggtacatgtgcacaatgtgcagcttagttacatatgtatacatgtgccatgctggtgtgctccacccattaactcgtcatttagcattaggtatatctcctaatgctatccctccctccttccccgaccccacaacagtccccagagtgtgatgttccccttcctgtgtccatgtgttctcattgttcaattcccacctatgagtgagaacatgcggtgtttggttttttgtccttgtgatagtttactgagaatgatgatttccagtttcatccgtgtccctacaaaggacatgaactcatcatcttttatggctgcatagtattccatggtgtatatgtgccacattttcttaatccagtctatcattgttggacatttggcttggttccaagtctttgctattgtgaatagtgctgcaataaacatacgtgtgcatgtgtctttatagcagcatgatttataatccttttgggtatatacccagtaatgggatgactgggtcaaatggtatttctagttctagatccctgaggaatcgccacaccgacttccacaatggttgaactagtttacactcccaccaacagtgtaaaagtgttcctatttctccacatcctctccagcacctgttgtttcctgacttttgaatgattgccattctaactggtgtgagatggtatctcattgtggttttgatttgcatttctctgatggccagtgatggtgagcattttttcatgtgttttttggctgcataaatgtcttcttttgagaagtgtctgttcatgttcttcacccactttttgatggggttgtttgtttttttcttgtaaatttgtttgagttctttgtagattccggatattagccctttgtcagatgagtaggttgcgaaaattttctcccattctctaggttgcctgttcactctgatggtagtttcttttgctgtgcagaagctctttagttgaattagatcccatttgtcaactttggcttttgttgccattgcttttggtgttttagacatgaagtccttgcccatgcctatgtcctgaatggtattgcctaggttttcttctagggtttttatggttttaggtcaaacgtttaagtctttaatccatcttgaattaatttttgtataagatgtaaggaagagatccagtttcagctttctccatatggctagccagttttcccagcaccatttattaaatagggaatcctttccccattgattgtttttctcaggtttgtcaacgatcagatagttgtagatatgcggcattatttctgagggctctgttctgttccattgatctatatctctgttttggtaccagtaccatgctgttttggttactgtagccttgtagtatagtttgaagtcaggtagcgtgatgcctccagctttgttcttttggcttaggattgacttggcaatgtgggctcttttttggttccatatgaactttaaagtagttttttccaattctgtgaagaaagtcattggtagcttgatggggatggcattgaatctgtaaattaccttgggcagtatggccattttcacgatattgattcttcctacccatgagcatggaatgttcttccatttgtttgtatcctcttttatttcattgagcagtggtttgtagttctccttgaagaggtccttcatgtcccttgtaagttggattcctagatattttattctctttgaagcaattgtgaatgggagttcactcatgatttggctctctgtttgtctgttattggtgtataagaaagcttgtgatttttgtacattgattttgtatcctgggactttgctgaagttgcttatcagcttaaggagattttgggctgagacaatggggttttctagatatacaatcatgtcatctgcaaacagggacaatttgacttcctctttttctaattgaataccctttatttccttctgcctaattgccctggccagaacttccaacactatgttgaataggagtggtgagagagggcatccctgtcttgtggcagttttcaaaggaaatgcttccagtttttgcccattcagtatgatattggctgtgggtttgtcatagatagctcttattattttgagatacgtcccatcaatacctaatttattgagagtttttagcatgaagtgttgttaaattttgtcaaaggccttttctgcatctattgagataatcatgtggtttttgtctttggctctgtttatatgctggattacatttattgatttgcatatattgaaccagccttgcatcctagggatgaagcccacttgatcatggtggataagctttttgatgtgctgctggattcagtttgccagtattttattgaggatttttgcatcaatgttcatcaaggatattggtctaaaattctcttttttggttgtgtctctgccaggctttggtatcaggatgatgctggcctcataaaatgagttagggagggttccctctttttctattgattggaatagtttctgaaggaatggtaccagttcctccttgtacctctggtagaatttggctgtgaatccatctggtcctggactctttttggttggtaagctattgattattgccacaatttcagatcctgttattggtctattcagagattcagcttcttcctggtttagtcttgggagggtgtatgtgtcgaggaatttatccatttcttctagattttctagtttatttgcgtagaggtgtttgtagtattctctgatggtagtttgtatttctgtgggatcggtggtgatgttccctttatcattttttattgcatctatttgattcttctctgttttcgtctttattagtcttgctagcggtctatcaattttgttgatcctttcaaaaaaccagctcctgaattcattaattttttgaagggttttttgtgtctctatttccttcagttctgctctgattttagttatttcttgccttctgctagcttttgaatgtgtttgctcttgcttctctagttcttttaattgtgatgttagggtgtcaattttggatctgtcctgctttctcttgtgggcatttagtgctataaatttccctctacacactgctttgaatgtgtcccagagattctggtatgttgtgtctttgttctcattggtttcaaagaacatctttttttctgccttcatttcattatatacccagtagtcattcaggagcaggttgttcagtttccatgtagttgagtggttttgagtgagtttcttaatcctgagttctagtttcattgcactgtggtctgagagacagtttgttataatttctgttcttttacatttgctgaggagagctctacttccaactatgtggtcaattttggaataggtgtggtgtggtgctgaaaaaaatgtatattctgttgatttggggtgcagagttctgtagatgtctattaggtccgcttggtgcagagctgagttcaattcctggatatccttgttaactttctgtttcgttgatctgtctaatgttgacagtggggtgttaaagtctcccattattattgtgtgggagtctaagtctctttgtaggtccctcaggacttgctttatgaatctgggtgctcctgtattgggtgcatatatatttaggatagttagctcttcttgttgaattgatccctttaccattatgtaatggccttctttctctcttttgacctttgttggtttaaagtctgttttatcagacactaggattgcaacccctgcctttttttgttttccatttgcttggtagatcttcctccatccttttattttgagcctatttgtgtctctgcacgtgagatgggtttcctgaatacagcacactgatgggtcttgaccgtttatccaatttgccagtctgtgtcttttaattggagcatttagtccatttacatttaaagttaatattgttatgtgtgaatttgatcctgtggttatgatgttagctggttatcttgctcgttagttgatgcaggttcttcccagcctcgacggtctttacaatttggcatgtttttgcagtgggtggtacggtttgttcctttccatgtttagtgcttccttcaggagctcttttagggcaggcctggtggtgagaaaatctctcagcatttgcttgtctgtaaaggattttatttctccttcacttatgaagcttagtttggctggatatgaaattctgggttgaaaattcttttctttaagaatgttgactattgtcccccactctcttctggcttgtggagtttctgccgagagatccgctgttagtctgatgggcttccctttgtgggtaacccggcctttctctctggctgcccttaacattttttccttcatttcaactttggtgaatctgacaattatgtgtcttggagttgctcttctcgaggagtatctttgtggcgttctctgtatttcctgaatctgaacgttggcctgccttgctagattggggaagttctcctggataatatcctgcagagtgttttccaacttggttccatcctccccgtcactttcaggtacaccaatcagacgtagatttggtcttttcacatagtcccatatttcttgaaggctttgttcgtttctttttattcttttttctctaaacttcccttctcacttcatttcattcatttcatcttgcatcactgataccctttcttccagttgatcgcattggctcctgaggcttctgcattcttcatgtagttctcgatccttggctttcagctccatcagctcctttaagcacttctctctattgattattctagttatacattcgtctaaatttttttcgaagtatttaacttctttgccttcggtttgaatttcctcctgtagctcggagtactttgattgtctgaagtcttcttctctccactcgtcaaagtcattctccgtccagctttgttccattgctggtgaggaactgcgttcctttggaggaggagaggcactctgctttttagagtttccagtttttttgctctgttttttccccatctttgtggttttatctacttttggtctttgatgatggtgatgtacagatgggtttttggtgtggatgtcctttctgtttgttagttttccttctaacagacaggaccctcagctgcaggtctgttggagtttgctagaggtccactccagaccctgtttgcctgggtatcagcagcggtagcttcagaactgcggattttcatgaaccacgaatgctgctgtctgatcgttcctctggaagttttgtctgaaaggagtacccggccgtgtgagatgtcagtctgcccctactggggggtgcctcccagttaggctgctcgggggtcaggggtcagggacccacttaaggaagcagtctgcccattctcagatctccagctgtgtgcttggagaaccactactctcttcaaagctgtcaaacagggacatttaagtctgcagaggttactgctgtctttttgtttgtctgtgccttgcccccagaggtggagcctacaaaggcaggcaggcctccttgagttgtggtgggctctacccagttcgagcttcccggctgctttatttacctaagaaagcctgggcaatggcgggcgcccctcccccagcctcgctgccaccttgcagtttgatctcagactgctgtgctagcagtcagtgagactccgtgggtgtaggaccctccgagccaggtgcgggatataatctcgtggtgcaccgttttttaagcccatcggaaaagcgcagtattagggtgagattgacccgattttccaggtgccatctgtcacccctttctttgactaggaaagggaactccctgaccccttgcgcttcccgagtgaggcaatgcctcgccctgcttcggctcccgcacggtgcgctgcacccactgtcctgcacccactgtctggcactccctagtgagatgaacccagtacctcagatggaaatgcagaaatcacccgtcttctgcgttgcttactctgggagctgtagaccggagctgttcctattcggccatcttggctgccagcttctttgtgtagtttcattaccacttgagatgcaattaaatttgttttagttttcagtttgagggaatttgtttttctttttagttcaactttagtttttgagtatgtataattttaagcagcattaatagagtataatcttttcaacactgcccaaaacatgacacatctagaataatctgtttacttctttttgccatattttaggaatggccagcccagtatcaagggtgggatgatacgagtggtttatcctggatctggatggcaataaggggatatattgtctatgtctgtaaagaatttcaaaactataataaaactaacaagattttgtctgggtttttattctcaccatgcaccagcaattctcaatactaccagtgagaaagtacttctccctccactgagtgtgttgctaagaagcttattaagcagtttgagtatccaaaggagagtaataagactgacgaggaatctgaaaaccatagcccatgagagatgaacagattttaatatcaatcagagaagaaaagatgaagaaattcacaatttcctcatctatttaaagactgtagtgtaaggaaataagttagactttgtgtactgaattccatgtttcattactgggtagaagttacagaacaaatggatttagcttattataaggagaagttttctaattgttagaatttacatatctgtggaatgaggctatttgtcaaactagagagttctttttcccttaaagatgtatagtaagagcagtgcgaacatctcacaagggatgttagatattcttctgtggatagatcttgcacatgatgacctcctgggctctcccagccctgtgattctgagatcacagtgcccatttcaggaatcctcactgtctagacccatccactaaaatgaatcatcatcttattcacatctaagccccattacaagtttattaatatcatccctttcagtggaaatgcgaaatattttattcagttatgctaatgtaattagctcataatgtcaaatgcttgagaagttgaggttgtagttctgctgggtatttgtttctcatgtcaaatatcataccatcagtgaaattgttcataaccaccaaaattaacaattagccccttcagcccctcttccacctttatcatatttatttgcttaacaaatttatctttttttttttttttactcattgattctgaatctccctctatttaaatgtatattctgtgacagcagtcctcaacctttgttgcaccaaggaccagttttgtggaagtcagtttttccacggacaggggcagaacaggggatggttttgggatgaaaccgttccacttcagatcagatcatcaggcattagattctcatgaggagcatacaacctcaattcctcgcatgtgcagttcataatagggttcgtcttcctatgagaatctaatgccaccactgatctgacaggaggcggagctcaggtggtaatgcaagcagtggggagtggctctgaatacagatgaagctttgctcattcaactgccactcacctactgctatgtagcccagttcctaacaggcttcagaatgggggatgggaaccctggttctatgagagcagaatccatgtatctttttgtaccactgaatcccaagcatttcgtgttggtacatttttctgtaagggaatccgtgtcttttgttggcttttaaaatggccacctaaaaaaatttaggaactactataagagtaatgttgtcaaaatcaaataccactgttgagattttgaatctgtgaaggataattgcattcttaatattttgtcttcccttccaaaatcatgctagttagtatttcttcatttattcaagatttcttttatgccaaatagtaaattttggtaattttctttatataggccataaacatgtattattaatttaatttcttggtattttttaatctactaatgggtctactaatgagctttctcaaaggaaggaaaggagggaagaagaagggacattggaaaaggatatacagaatatttttatcagtctaggtaaaggttaacttgcctctggtaatctcatttttttaagttctttaagcatatagataattaagaaaataaattggctaggcactgtggctcgtgcctgtaatcccatcactttgggaggctgaagtgggtggattgcctgaggtcaggatttcaagaccagcttgaccaatatggggaaaccccatctctactaaaaatacaaaagttagctgggcatggtggcatgcgcctgtagtcccagctattcaggaggctgagacaggagaattgcttgaacccggtagaattgcttgaacccgggaggcggaggttgcagtgagccgagatcatgccattgcactccagtctaggcaacagggcgaaactccatctccaaaaaaaaaaaaaaaaagttagaaaaagttcctatggaaatgtgttataattttattattaaagtactgaaaaatacattattagaaaacttcaccttggaatcttttttaagcattactcttttgcttgtggtttttgtcatcttttacagacttgaatgttgttctaggacagaatattgttgtactttattttagtgaagcataaccatatcaaataacatttcagaactatacattgcacaatcttggacattttcttgtaagaaggcactaaggaaattttatttttgtgaaagtaattcttaagtaacagtgactgttttttatgggctagctccagaccacatttgcctccttcccatgatcttgtttttctgatgtcccaagctgtaagtatagaggtcagaatgacattttagggctctaggtttgaatctcataatcttaaaatggatattattcagtttatcaaaaagatcagttctattttttttttcagattaaaaataaattaggccagacatggtggcttatttctgtaatctcaacactttggaaggccagggtggatggatcacttgagcccaagaatttaagaccagactgggcaatatagtgagaccctgcctctaataaaaattttaaaaattagctgagtgtggtggcacacacttgtggttccagctatttgggaggctgaggtaagaggatcacttgcctaggtagtttaggctgcagtgagctatgattgtggcactgtactccagcctgggtgacagaatgagactgtctcaaaaaaaaaaaattagttttaccaaaaatagtgcaaataattttcatttacctttaactcacattcccaaatgttaaaattttaccacatttgctttactattgtgtttgtctcttttttttgaaatggttgagaataagtttacagacatgatgtcccattgctaagtactacatggtgtatttcttaaaaataaggatatttttcaaaatcaggaaattaacattgataaaaactattttaagtaaaaaatgccttttttctcctccaagtcaggaatctaataccaaaatcatgttacatatagttgtcttctttcatcttttttaatctggaatggtccctcagtctttctttgtcttttatggcctttaaaatttggagaatacagaacagttttttgtttatttgtagaatgtccctcaattttggtttgcttgattttttgggaattagattttggctatgctgtgatcatatcaggagccacatgacatctacttgttccattactgatgttaatgttaactgtgatcccttgtttaaagtgctggtgatacacatttttcaagaatatgtttcttgtattttaagtttttgctctcttttggtagatggagtcctagaatcctttccaagactcaatagaaatatctctttaaatataagcctactttaaaagatttttaactactctgttttggagattaacagcttcttaagactttctctatttcagaggaattttgttttgtctaataatctgtctcctgctctaggttgtaagctccctaagggtagagattgtgtgtacatcattccccaccctgtcttcaatgcccagcactattcccacatgcagtagatagtagttactgcttgactgattggttgtttgataggctggtggttgaatggatgaatggattgttcgtttgtggaaatttgcccatttcaaatcttctaacttactagttttgagttcaacatactttaaaaattacctatcaccctcttggtattaatactttgatatagttttgatgtagttcttcagacatgattctcaaggactaataatagccaagacatatcagatatgttcactattgtgttgattcaccttgtcagattgattttacattctcttctctctagcttgctatttttaaatggcctgaaatgtggcgtcagtgaaattactctgacaataatagtaataattcttattggtcctcttattactttattttttgtaatatcactttaaaatcttggagcggtttaaaattttttactatgttgttcgcttatgggtttgaggcttagagagatcatacacccactattataaagctgccaatgggtgagcaggatttagatttctaagttttgtctttctttaaaaaattttatttttgcaagcacttttccaaaggatttctaagttttctgactcctaattcagtgttctctctaccataatctcttccatattgtagtagtattattgcctacttgccaggaacatattcctaataccgtgaagaaaaagtattttgtatcactttgttctaccaaggcgtattttatgtggttcactaatgacagcctcatattttgagacttttctcccagtgagtatgccttttctcccctaaatagactttttaaagagcagttttaggttcacagcaaaagtgatcagaaagtatagagttgccatatatcccctggcctccaacctcccccactatcaacatcctgtgccagagtgacatatttgttatagttgatgaaactgcattgacacataatcatccaaactacatagtttacattagggttcactcttggtgttgtatattctttggtttttgacaaatgtatgtatccaccattatagtattaatacagtagcttcactgtcctaaaaatcctctatgctttgtatattcatccctctctcccctctaactcctggcaacccctaatctttttgctgtctccatagtttttccttttccagaatgtcatataaatggaatcacacaatatgtagcctttgcagattggtggctttcacttagtaatttaggttcctccatgtcttttcatgacttcatagctcatttttttagccctaaataataatccatcgtctagatgtaccaccgtttatttatttattcatctactaaagaataccttggttgctttcaagtttgggcagttatgaataaagctgccataaacacctgtgtgcagatttttgtgtggatataagttttcaactcttttggataaattctaaagagcacaatttctggattgtatggtaagagtatatttagttttataagaaactgccgaactgcattccaaagtagctttaccattgtgcatttccaccagcagtgaatgagagttcctgttgctccacatcctcgcctgcatttggtgtaatccatgctctggatttgggccattcaaatagtctgtggtggtgtctcattgtttgaatttgcattttcctagtgatgtatgatgttaaacatctctccatatgcttatttgccatctgtatatcttctctgatgaagtgtctgtttagattttttgcccattttttattctgattgttcattttcttttttaactttttattctgacagtttttttttttcttgggcaccatctagtgaagatacacagaaagctttgaggacataaaaaatgatttattttttcaaaggaaaactcctctctttctgtttctctccttttacctttgtctttcagttatacctgccgccacttgcggagatatgtttatgtgttggacaaactgtatttcccccactctcactgttctacgcttcagcattgcttctcgaccctcagtgacaatggagaggaactcttgtctttaacttgctctcacattctcagatcctatgcttccaggttattaacctctgctgtccatttactgcatgctgcatgttgtatatgactgacaattgcatgttttaataagacatgtgtcaattaaattattaaagagaacatttatatttgaaatggtactaaataatttttttaaaataatagctggattttgtttccttacaaatgtcttcttaagtaatttatattatgtttcacgggagagaggaaagctttcaaccacagagttgtctatataaacttgccagaactattctataccgcattccatttgggaatcttttgatttatagtagttggagtgctctgatgttttatatgaaatagactctacagttactatgacctttgagttctccttcatgcaagcacacctgagagctagctgtaggatttcacctatgttccgatagaggtgcattcagttgagcaggttgattttataggaaggcagaaattatactattggggttttgtattttgtactcattttatttacatacagagtggctataaaatcatataaaatcagcaggttgcaatgtgtcatggatgaatgtagattaaacataatgggggtcggtggagtaagaaagagacaagctgtcaatctcgaatatcagagaaaatcaacacctgctgttttgtgtttatcgtgcaccaaaatagaggggcagtatgacattaccactttgtgctttgcagttaacatttttaacacgtttttttttttctaagtaagagatgacttataccagcactatactgttagctagatatggtgatttaaggcaataacttcactgccagatgatttagatgaagaaggagaaaactccatgacaaccttaaccagaaattagcaaacatttagaatttaaaatagaccttttcagatgatgaaacatataaaacttgagactatacataatatctaagtgaaaatacttgattgctaggaaaggaaagcagtctggtgtgtaagttgacagagacttttcttggaagcagaaagattttatagactcgtgatgatgttgatcagcctcacatcgagtcaatgtagatacttttgagaaataaaaaactgagggttagaaaagtaggtgaaaataatagaattaactgttacgtatgtaatgttagaagaatttatcaaatttagcagactaaacccagtgactttccactggcttatggaaagtgagggaatatcaggtaagttgcatgatactctcaggaattggagacagagtgtgtctggtttcaaggaatgaggagaactgctgctgatcattgaacttctgaaatgtgcaggataattgacgtctttttctttttaattttttttttttttttttttttgagatggagtcttgctctgtcacccaggctaggctgcagtgactcaatctctgctcactgcaacctctgcctccctggcccaagcagttctcccacctcagcctcccgagtagctgggattacaggtgtgcaccaccacgcctggctaatttttatatttttagaagagacagtgtttcaccatgttggccaggctagtcttgaactcctgacctcaagtgatctgccctcctcggcctcccaaagtgttggaattacaggtgtgagccactacacccggtcgaccttactcttatttactagtgtatcatcggactctccacaaaaccaataggagattttatatgtaagtggagagagagagagatggagacagagctattttgggctttggctattgcaggggcttgcaagtctgaaatctgtagggcaggttggcagcctggaaattcaggtaagccttgatattgcagtctcaaattctaaatgcacagggcaggccgtcagacaagtgactcaggcaggatttttatgctgtggtcttcagacagaattccttcttcctcaggaaacctcagtctttataatagcttcagctgattgggtgagtcctattcatgttataaaaggtactctgctttccttaacattccataaatgttaatcacatctgcaaataccttcacagcaacatctagactagtgtttgacccaacaactgggcacaatagtttagccaggtttacacataaaacatcatcacactatgcttctcttctgtgttctttgttaccacgtatctgttccatgtgtttttctttgtatatatcctatcctgtcatatctctcctatggttttgtggaaactataagccttctgggggtaaacactatatcttgttcattgttatacatcgtatagcatatcatgcctggcgcattgttaaccctcattaatacagctggcagcagattttagcattcgtcatgtgtgccagaggcccctgtcttttttctcctggagtcacactcctcacctagcaggagcagacaggagacagaaatacatgttcagctgggaaaataaaagaaaatgaaagaaaaaggagaaggaagacaaagtagggaaaaacaaaagtttaaaaatgaggagaaagatggagacaccatgtggtgaaagcagtgtccaattcctgagcctccttcccctgatgcccagcagagttcagccaacactcagtttctgagtcagtgtagaatttattctgcattttctgtttcctctttcaacacctttcctggaaccccctccttccttacccacttgggtttctcagtactctcagctggggtttacagtatgaagcctccagggggtattttttcaatatcaagccctcctgaggccctgcccatttttttctgaacaacagagaagaaatacagtgttaatatagtgtagtggctaggggcatgggctctggagttaaggcttcctccccatacccccaaccaactttcactccttgccttaccacttgcagtctgggacaggacagaggacactgttctattcaggacagacctgaatagatttgcataaaaggaattacctcgccatcttctcttgccgtgttcctttgcaggtgacaaacattttgcatacacagtgacacatggccaggtggagtgtagtccctgcaggtgagagattttcttcaacagaactacattatatagagagacaaaccaagccaaatatctgaatggagcaatcatggacttacttaacaaaatcaaatagctttctgttatgcggaatttaaaaatgtaactcagtttctagagagaaatataagcttatttcttaaaaaagaactttaccagctgggcgcggtggctaatgcctgtaataccagcactttgggaggccaagatgggcagatcataaggtcaggagatcgagaccatcctggctaacacagtgaaaccctgtctctactaaaaatacaaaaaattagccaggagtggtggcacacgcttgtagtcccagctactcaggagtctgaggcaggagaatcgcttgagcctgggagacggaggttgcagtgagccgagattgtgccactgcactccagcctgggtgacacagagcaagactccgcaaaaaacaaaaaaaaaaaaacaaaaaaaaaactctaccttagtcaaacatgacttactgctatagatagaagtcttactccactgcaaacttcttccaaatgtaagaattcgtttcacagcaaccctgaaagagagcacttctgtgtgctgcttacctcagaaggcagtaaagctcttgctgtttcatttttagaaagattagaatatgttaagcctgcctaccaataatttttgtatattggctatagctctgtgctttagagaaacacataaatgtgtaaactgtgctgtctatgaggtccccttgggtttttgaaaacacctgtcattgactccccttaatttttgttctcttcagcttaaataccttggccacttaaaccattcctgacagccgatgatttttagattatgcagtctttttattatcttcttggatgattgatagtacccatcataaaatttgatatccagaatttgatataatatttcagtatattttataatttaaaaatatgaattataaaattatagttatgttatatgtatttttttctcatctactatggcaatctgtaataaattatactcttaatttgtcctaagactggagtgatttttaaaagcaggcacaccttgactcatatagaattaccagatctttttcacacaaaaacacatttctctagatttgtatatttaattatttgaatgtgattgcagggctttacatttgttcttatttaaatgtaatgtattgaggccagtcacagtgactcacgcctgtaatcttagcagtttgggaggctgaggcaggtggatcacctgaggacaggatttcaagaccagcctggccaacatggtgaaaccctgtctctactaaaaatacaaaaaattagctgggtgtagtggtacatgcctgtagtcccagctacttgggaggctgaggcaggagaatcgcttgaacccaggaggcagaggttgcagtaagccgagatcacgccactgcactccagcctgagcaacagagtgagactctgtctcaagaaataaataaacaaataaatatatgtaatgtattgaatttatcttgttctgagtcacattttatgaagccataagcctttcagacctgttagctcctccattttacccccagaagcattgaaatcagctctcaaactaccaaccttggatttgacttctctagaaatcaaatttagaattttgagtaagcgcttgagaatttcaattcattgctaggcttttttagtttgtgtgtgcacttcagtagcgagttgaggtttacttagtgcttttgacaatgattgtgatatggtcaaagcatgctgcttctgatgactgtcatgcatttaagtgaatctgagaggaaagaatctgactttaggtaacagaccaatactgcttagagttccacgtccaattttaagttctaatttcttaggtttcagggtggagtagtgaataagtttggtgagaaatctgtgaagtaagaaagtacctatttgtctttatttttacttcacatactttgctgatgtcaaaaatatagctgctactattgttttaattaggcctgaggcaaggaaaaatgaagggctaagtttagtgttgagttaattctgttgcagtggcacagtttattttgagttactattaactcggctcttcagattgttgctgcttgatgagagaaagctgaaaagagcatcagaaatgtttaaaaattattttctaacacacattgagttaaaaacattatattctctttttataaagtaaagcatgttaacactgaagtccttgactagttaatactttgccaggatcagtggttcctgaccttttggggttcatataactcttctacaatctattaaaaattatagaccctctcttcaaaaaccagaaataggagtggacctgatttaggcttacatggacctgatttaggtagagttttagatataggtgctgtgtaaaagagagactcccctgcccaaataatagtggcttaaagaagcaaatggaagtttacttctcaagtaaaagtatgagctaatgtggcagctctgccccatagaattttcaagacccagagttcctttttttttttttttttttttttttcacttttttaaatttatttttttattgataattcttgggtgtttctcacagagggggatttggcagggtcatgggacaatagtggagggaaggtcagcagataaacaagtgaacaaaggtctctggttttcctaggcagaggaccctgcggccttccgcagtgtttgtgtccctgattacttgagattagggattggtgatgactcttaacgagcatgctgccttcaagcatctgtttaacaaagcacatcttgcaccgcccttaaaccatttaaccctgagtggacacagcacatgtttcagagagcacagggttgggggtaaggtcacagatcaacaggatcccaaggcagaggaatttttcttagtgcagaacaaaatgaaaagtctcccatgtctacttctttcacacagacacggcaaccatccgatttctcaatcttttccccacctttcccgcctttctattccacaaagccgccattgtcatcctggcccgttctcaatgagctgttgggcacacctcccagacggggtggtggccgggcagaggggctcctcacttcccagtaggggcggccgggcagaggcgcccctcacctcccggacggggcggctggccgggcaggggggctgaccccccccacctccctcccagacggggtggctggccgggcggggggctgaccccccaacctccctcccggacggggcggctggnnnnnnnnnnnnnnnnnnnnnnnnnnnnnnnnnnnnnnnnnnnnnnnnnnnnnnnnnnnnnnnnnnnnnnnnnnnnnnnnnnnnnnnnnnnnnnnnnnnnnnnnnnnnnnnnnnnnnnnnnnnnnnnnnnnnnnnnnnnnnnnnnnnnnnnnnnnnnnnnnnnnnnnnnnnnnnnnnnnnnnnnnnnnnnnnnnnnnnnnnnnnnnnnnnnnnnnnnnnnnnnnnnnnnnnnnnnnnnnnnnnnnnnnnnnnnnnnnnnnnnnnnnnnnnnnnnnnnnnnnnnnnnnnnnnnnnnnnnnnnnnnnnnnnnnnnnnnnnnnnnnnnnnnnnnnnnnnnnnnnnnnnnnnnnnnnnnnnnnnnnnnnnnnnnnnnnnnnnnnnnnnnnnnnnnnnnnnnnnnnnnnnnnnnnnnnnnnnnnnnnnnnnnnnnnnnnnnnnnnnnnnnnnnnnnnnnnnnnnnnnnnnnnnnnnnnnnnnnnnnnnnnnnnnnnnnnnnnnnnnnnnnnnnnnnnnnnnnnnnnnnnnnnnnnnnnnnnnnnnnnnnnnnnnnnnnnnnnnnnnnnnnnnnnnnnnnnnnnnnnnnnnnnnnnnnnnnnnnnnnnnnnnnnnnnnnnnnnnnnnnnnnnnnnnnnnnnnnnnnnnnnnnnnnnnnnnnnnnnnnnnnnnnnnnnnnnnnnnnnnnnnnnnnnnnnnnnnnnnnnnnnnnnnnnnnnnnnnnnnnnnnnnnnnnnnnnnnnnnnnnnnnnnnnnnnnnnnnnnnnnnnnnnnnnnnnnnnnnnnnnnnnnnnnnnnnnnnnnnnnnnnnnnnnnnnnnnnnnnnnnnnnnnnnnnnnnnnnnnnnnnnnnnnnnnnnnnnnnnnnnnnnnnnnnnnnnnnnnnnnnnnnnnnnnnnnnnnnnnnnnnnnnnnnnnnnnnnnnnnnnnnnnnnnnnnnnnnnnnnnnnnnnnnnnnnnnnnnnnnnnnnnnnnnnnnnnnnnnnnnnnnnnnnnnnnnnnnnnnnnnnnnnnnnnnnnnnnnnnnnnnnnnnnnnnnnnnnnnnnnnnnnnnnnnnnnnnnnnnnnnnnnnnnnnnnnnnnnnnnnnnnnnnnnnnnnnnnnnnnnnnnnnnnnnnnnnnnnnnnnnnnnnnnnnnnnnnnnnnnnnnnnnnnnnnnnnnnnnnnnnnnnnnnnnnnnnnnnnnnnnnnnnnnnnnnnnnnnnnnnnnnnnnnnnnnnnnnnnnnnnnnnnnnnnnnnnnnnnnnnnnnnnnnnnnnnnnnnnnnnnnnnnnnnnnnnnnnnnnnnnnnnnnnnnnnnnnnnnnnnnnnnnnnnnnnnnnnnnnnnnnnnnnnnnnnnnnnnnnnnnnnnnnnnnnnnnnnnnnnnnnnnnnnnnnnnnnnnnnnnnnnnnnnnnnnnnnnnnnnnnnnnnnnnnnnnnnnnnnnnnnnnnnnnnnnnnnnnnnnnnnnnnnnnnnnnnnnnnnnnnnnnnnnnnnnnnnnnnnnnnnnnnnnnnnnnnnnnnnnnnnnnnnnnnnnnnnnnnnnnnnnnnnnnnnnnnnnnnnnnnnnnnnnnnnnnnnnnnnnnnnnnnnnnnnnnnnnnnnnnnnnnnnnnnnnnnnnnnnnnnnnnnnnnnnnnnnnnnnnnnnnnnnnnnnnnnnnnnnnnnnnnnnnnnnnnnnnnnnnnnnnnnnnnnnnnnnncggggggctgaccccccccaacctccctctcggacggggtggctgccgggcggagacgctcctcacttcccagatggggtggctgccgggcggagaggctcctcacttctcagacggggcagctgccgggtggaggggctcctcacttctcagacggggtggttgccaggcagagggtctcctcacttctcagacggggcggccgggcatagacgctcctcacctcccagacggggtctcggccgggcagaggcgctcctcacatcccagatggggcggcggggcagaggcgctccccacatctcagacaatgggcggccgggcagagacgctcctcacttcctagatgtgatggcggctgggaagaggcgctcctcacttcctagatgggatggcggccgggcggagacgctcctcactttccagactgggcagccaggcagaggggctcctcacatcccagacgatgggcggccaggcagagacactcctcacttcccagacggggtggcggccgggcagaggctgcaatctcggcactttgggaggccaaggcaggcggctgggaggtgtaggttgtagtgagccgagatcacgccactgcactcccccagagttcttttctgttgtgttccaccaccccctgtgtgttgctctgaccaaaaggtcgcgaatggctcaccacaagctctgcatttcagatagtagaagagtgaaagggactagggttggatgtacatttccattttaagggcatcacacatccctttggccaaaagtttgtcataggactacccaacgtgcgtggtgagctggaaagaaagttttcggctaagtgaccctgtggcctgctaagtattctgctgttgggtaagaagggaagatggttatggggacaactaacagtctctgccatacaatagagagttcctgtcctgactaattaacaaatgcttattcagtgattaccgtgtgattagtcctgtgccaaacagcaaatggggttcatggtgaagacagaaaaataataccattgggaaaaaatcattaccttgtactgttagttaaatataaaattagtaacatataaaaagcgatctcttctgacaggagaatctgaagtagtctgaaacaggattatctgcgcagtaactaagaatagataatgtgctattagcagagtaggcatggaaaactcaagtccagaagttcacatatagaagagcacatgacatatgctaaggcagtaataggatgtttggcaaaaacagatttatctgtgatattaatcagtattgcaacgagttacattctccagggccagactctcgagggccttgaatgctaggccaggccatttcatgtattttatttgttctggctttttttgtgtatgattttggtagcccattgagttttacttggtgcttttgagcctgactgatgtggtcgaagcatgctgcgtctgatgactgtcatgcatttaaatgaacctgaggtgaaagaatctgaatttaggtaatagaccaacacatagactacctgattgtggcagtagagatggaaaaagaaggacttaatggaggtgaactttgaaaaaaaaaggaattgaagtatgatattgagagaacataattcaacattgaaatggtgtagtatgaaatattagcaggaactgtgttattacttctgtgcatgtagttagttcctatcaacatggcaaatatttagtatgtatcatttgtgtggtttatattttatactgtaagaggagtgtgctaggggtattcttattaccgatactcatattaaaagctttgtgtaatcagttggtaaaagaatgattttttaagagtgaagattttttgaactgtccaaccatttaaaaatttgttatactaaagatatagcataatacgtgattctggattattttccagccatacaatgcaatacaaagaatggcgattcaagagatctgtttcacaacatggtgattattgttaataacaatgtattgtatacatgaaaattgctaagagagtagatctttaagtgttcttaccacaaagaagtatgtgaagcaattaatatgttaatttgcctgatttaatcatttccacaatgtatacatatatcaaaacatcatttacatcataaatatatataatttttgtcaattaaaaaatttagtaatgaagatagtggattctataaagaaatatgctagaagtatttaccaaaagtcattaaaatgttaatatattggaatttatcttaagggaagaacttaacctaaagaaagggttatatttaggaacaaaatagaagaatggtcaaataaactatatcctatcaactcaatggaatatcatacagccattaaaatattataaagaaaaataagtagaaatatggaaaacatttgacataatgtttatgaaaaaagaatataagcttctatactgctattttctatttttagtagttatatttgatataatgtttaatgaaaaaaatataaaattatatactgctattaaaacaactacataaaaattatgtatgtgtccaaaaaccagataatgtataaaaatagctgtggaacaatagtaaaatgtacatgacatttctttttaaaattatttaaaatttatcttttacaaattaaaaaaattatgcaaatttaaataaattttttctctcacttttctctaccctcctcccaaccacccctaagttacatgtatgtctttggattttctttccttttttccctctactaacataatgcaatgccactttattaataggcaaagaactgcggtggtttacaggattagataggagttcctcagtatgatcacagagaatttctcccatggtttattttagaactttcatagatttgctttttttcttctttttttttcttttctttttaactgaatggatttataattctaagtacgtgtaatatgaaatcatttttatatctcaactgtagcactttcaaatttaggaatacttttacccatttgtcatgtcttttatactgtgctttaaaaaaaatcacatctggtgccattttattactttcaaaggattgcatcttcagtctaaatctaagacaaagctctaatgagtttcctcaaaacaagttttaaaaattgctggaatggtcttgtcatataatatgctattcacttaatctgtaatgaataaatacttgaagctatagtaataatttttcatgcatatgatactgtcgtaataattctgttgtggctgtgctttattgatttctgtgccacttctgtggcatgaaatgaaatgtattatcccacttaaaccattatggtttccttttgaattacatattcattacttgatcctgtcatcaagcctattctattttccataatgtggtattcagtcttaaagatttacagcgttagtcagtgcagtataagtcaaaataggacaagtaaattcagatcagaaaagttggtaagaaaatgtaatagataaatttttttatttaattatactttaagttttagggtacatgggcacaacgtgcaggtttgttacatatgtatacatgtgccatgttggtgtgctgcacccattaacttgtcatttacattaggtatatctcctaatgctatccctcctttctccccccaccccacaacaggccctggtgtgtgatgttccccttcctgtgtccaagtgttctcattgttcatttcccacctatgagtgagaacatgtggtgtttggttttttgtccttgtgatagtttgctgagagtgatggtttccagcttcatccatgtccctacaaaggacattaactcatccttttttatggccacatagtattccatggtgtatatgtgccacattttcttaatccagtctatcattgttggacatttggcttggttccaagtctttgctattgtgaatagtgctgcaataaacatacgtgtgcatgtgtctttatagcagcatcatttataatcctttgggtatatacccagtaatgggatggctgggtcaaatggtatttctagttctagatccctgaggaatcgccacaccgacttccacaatggttaaactagtttacagtcccaccaacagtgtaaaagtgttcctatttctccacatcctctccagcacctgttgtttcctgactttttaatgattgccattctaactggtgtgagatggtatctcattgtggttttgatttgcatttctctgatggccagtgatgatgagcattttttcatgtgtcttttggctgcataaatgtcttcttttgagaagtgtctgttcatgttcttcacccactttttgatggggttgtttttttcttgtaaatttgtttgagttctttgtagattttggatattagccccttgtcagatgggtagatggcaaaaattttctcccattctgtaggttgcctgttcactctgatggtagtttcttttgctgtgcagaagctctttagttgaattagatcccatttgtcaattttggcttttgttgccattgtttttggtgttttagacatgaagtccttgcccatgcctatgtcctgaatggtattgcctaggttttcttctagggtttttatggttttaggtctaacatctaagtctttaatccatcttgaattaatttttgtataaggtgtaaggaagggatccagtttcagttttctccatatggctagccagttttcccagcaccatttattaaatagggaatcctttccccatttcttgtttttgtcaggtttgtcaaagatcagatggttgtagatgtgtggcactatttctgagggctctgttctgttccattggtctatatctctgttttggtaccagtaccatgctgttttggttactgtagccttgtagtacagtttgaagtcaagtagcgtgatgcctccagctttgttctcttggcttaggattgacttggcgatgcgggctcttttttggttccatatgaactttaaagtagttttttccaattctgtgaagaaggtcattggtagcttgatggggatggcattgaatctttaaattaccttgggcagtatggccagtttcatgatattgattcttcctacccatgagcatggaatattctcccatttgtttgtatcctcttttatttcattgagcagtggtttgtagttctccttgaagaggtccttcacgtcccttgtaagttggattcctaggtattttactctctttgaagcaattgtgaatgggagttcactcatgatttggctataatagataaatttttaaaaattgttcttctaacttagtatgtttctggtttggggtttttctttttttcaagaaccatgggagtgaattgtttacatgcattctaggggagagtagaaggcacattttgagaaacttcaccgccttctttacttgacctcaacagatgaactaggtagtacagccccaccctcttttggcttctgtgacagcatactcctggctttcttcccccccttttgccattttttttatgctttttggttttaaacattagaacttttaaaaagcttgttcctaaagcccttttctgtacttaaactcttaccttagccattttcatcaatttctatgactttacatgacatccacatgccaatatgttccaaattgatagtccagctgaaactctgagcccttgtcctgtcctgagagctgccttactgttaacatcaacactcatacctcacatgtcccatctcccaagagaactcttaagctttctccataaaccttttcatctccatgaatggtgcctgtatccgtcaagttgcttctgcccaccatctaagagtcatcagcattttcccctcacctgctgtattcatcctcactacatccatttcagttctctatccaaaatataaatcaaatctgtacttttttttctctgttaccactgccagtcaccctagctcagacagtccttatcacacacctggactcctacctagtccttttcctcaagttctgtcaccccaccctcacccctaattcccgatccagcaagcatcttcatagattctaagttacatgtatcttccttgctcaaccctttagtgacttttctttgcccttaggatgctacattctctagccatatcaattgtgctttctcttccaggagttgctcaccccttttctatctcaggactttttgcatgttctttcctgtctttttccttctccatattttcttacatttttcacttcctcagacaagttttcctttatccaaaacattgttatgttaatattatggttcctctcacacaccacccctcgcactctctcacttttgctgtcactctcactctaagagtagatcattagttccataagggcagaaaatgtgtgtgtgtgtgtgtgtgtgtgtaaccactgatccctagcacttaatatgatacttgggtattcaataggtgcttcatatttgctgagaatgggtaattttgttttgctgaaatgaacttaactttttgcagacttgctcagtctactaatgaccacttttcaatagacttagagaagcagtaaagtgtgatcctgttataaagctactgtgtcttaaaagtagcattcaaggccgggtgcagtgcagtggctcacacctgtaatcccagcactttggaaggccaaggcgggtggatcacctgaggttaggagttccagaccagcctggccaacatggcgaaaccccatctctactaaaaatacaaaacattagccgggtgtggtggtgggtgcctgtgatcccagctactcgggaggctgaggcaggagaattcgcttgaacccgggaggtgaaggttgcagtgagccgagatcgcaccactgcactccaagttgggcaacagagtgaggctccatctcaaaaaaaaaaaaaaaaaaaaaaaaagatggtagcattcaagagagcataattagataatgaagtatttggttgtagttctctggttttagtttctacccacgtacagtaaaactacctgactaaacgaaggctccctaagtcttcttgaatttgtggaattgcattgcttttcctcccagtgaaagaatttacaaattttccacttgttgaaattatctgataaccatgaccatcaaggcagtatcaacatgctttgaaacatccctcctaaaaacacaaaactttttcttgtggttgtatctatagtgttgagtgggtagggtgctttggcttcaattctgggtagaagcagtagtgtagattctgttatgatttcctcagctaggaggggaggatagggagaggctggttaatgaatacaaaattatagctagctagaaagagtgagttctgttgttctgtggtactgaagggtaaatatggttaactataatttattgtatattctcaaaaaactagaagagagaattttgaatgttcacaacacaaggaaatgatgaatatttgaggtgatggctatcctaattactttgatttgatcattacctgttgtatacacacatagaggtatcactctgaatcgcataaatatgtacagttataatgcatcaactaaaaaggagaaaacttaattttaaagtaacacgatactttgagtagacagtgaactgaactaacaattacatcttgttaggtaagaataaagtgttgggaaaatatatacatatatgaccattaattaaataaaagcatgaaaaaaatcataaagtaacatttactctgctagcttcagctaagcagaagagcacagaagggaaagcaaaattattttacattaaattttgcctcttgacatttaaacacaaaattggaaaaatttgaaaatagagtagtcctagcaagctttaccatcaccactcactcccccaaaaagttttcctttggcataagtaaattatggaggctaatgactgcaatagtagtaacagagtgaagtttcaggaatataggtaaaacataagaaaatacatatttgtgtatattaaaaataccatttaactttttaattcaaaatgacttagcagaaaatcaaataaatttgtactataactggaaatatttttaaaatatttttttgtgttacttatgagagtattgttaagatttattgaagactaacagtaacattaaaaccccacccagaataaattttagattactagcctgccacagtgatctacactaaaatgtcaccaaattgtagtatcattcaaaaatggaagaaattaagtcagtgactaaaaatataacaaaaatacttattaactaactggatttttaatctgtaagaaggatgtcatgagaattttggcatatggaaacaatgtaagaataggaccttaggaaagaacgatatgaaattcatatttgatccaaaaaatggtagtagatccttttttcccaccagatgctcctaggtgtagattgcattggtgaaggaggcactctagtctcagttgatgtcgagtgtgtaggtgtgggtgtgtaggtgtgaccagaattcctgaatatggacatgctaaataacaaattaaaatttctcgtgcagtttaaactatgtgtatggaggatttggattggatacaaaattcctcaagttggatgctcttcctctgggctgccatttgcagggaatttcatgtacatattcagacatgcagacttgcacaactgcttattatagaaatattctttgttactaagtgtctaacagacttaaacatacagggtttccgtatatggagaaaagtgattccacccactccatgccctggcacgtcatgatgccagcccttagatttatttggcttccagaatttaaatagacagtgatgtaaatcagaagttagtgtttcacctactggcactaagtaactaaatcatcacattggtgatgaggaaggtaaatccttttcagtttggctacagaatggaaataacatttattacaatatgatctaagttatattgacaacagaatgatttatttctatgttataaaagatgaagaaggagaggagaatacagagaagttaaatggtttggcagtgatcacacaacaagccgaaagtagaatccaagtctctctggagtcccttctctgatcaaagtttcatcttattgaatgtcacagcattataaagtgagataaatgtatctcaccacacatgtgcttagtgaattattctcagtagatagcttcttctatttttaaacattttgttctgagattttaaaatttcaattctattctcttatgttttaaaaccgtgttcacagatttgagctaaaatgggaatcgaagagtgactttggcatttttccatgactattcttgtattgatcttaaactggcatcacacgtgttccaggagggcacttgttttgcacaacagttttacaaactagctgtctataagaggcagttcattaaaatttaatgtttttaaatgatctttagatgtatagaattttttaaagactacatattagagaaagcatgcatacaaaatatttttttttttgcccagtagtggtgataatagctaacatttattgaactcttactctgtaatagccactgttccagtgattaactctttattttaattttttttaattttatttttattatatattgacaaattacagttacatatttatggggtgcaaagtggtgttaagattttttaatacaatgtggaaagattaagttaagctagttagcatatccatcacctcgatatttaacattttttgtgacgagaacattagagatttactgttagtgatattgaaatgtatataacaattatattcaccatgctgtgcaattgatctaaaaaaggatcaaacttattcttcctgcctaactggggctttgtaccctttgactgtaatctccttttccccactacccccttggccgctggtaaccaccattctactgtctacttctatgagtttagtcgtttttcaatgcaatctctataaaaattccaatgccatttctcatacatatagaaaaataatcctaaaatttatataaaaccacagagaaacccaagtagccaaggcaattgtaagcaaaaaagaacaaagctggagcattacactactagatttcaaactactgtattctataaaatgatagtaattagaacacattgtacagtataaaaaaagacacattgaccagtggaacagggtagagagcccagaagagaacccatgcaactgtggtcaattgatcttcaacaaatgtatcaagaatatacagtaggaaaggacagtgtcttcaataaatggtgtttggaaaattggatatccatatgcaaaagagggaaatcgaacccttacctcacaccacctacaaaatcaaatcaaattggattaacatcttcagcataagacctgaaactgttaaactactggaagaaaacataggagaaaagctaaatgacattgtgtctggacaatgatatttatagttattaaatatttttatttaaatcctcaaaacaactctatgagatattattattcccattttatggataaggaaactgatgtacagagtgattaaatgacttgctagaggctaggtgcagtggcccatgcctgtaatcccagcactctgggtggaaggatcgcttgaggccaggagttcaagaccagcttaggcaagactctgtctcaaaaaaaaaaaaaaaaaaaaaaaaaattagccaggcatggtggcacatatgtatagtcccaggaggctgaggcaggaggatcgcttgagcccaggtgtttgaggctgcagtgagctatgattgcactattacactccagcctgggtgacatagtgagaccccgtctccaaaatgagtgaatgaatgacttgtttagaaagctattaaagcagtattgcaatccaaacattctggcccccaaagccacacttttgaccttattctttgcctcttaataatccttttaataatagtatgatttcattagctttgcccttgaaatcattttgactcatcgtagagccattacaaatttaatattatttgatgtctatacattctaaattatatttgtgtctaaattattgaacttctgttctttacctactcacaatttcactaggagataatttataaaactggctaaaatttaaaattgatgtgtaaactgtagaaacagaagaaactcaaaaccatttttcttggtcatttaaattctttattttccatttagtctggtctctgttctctaaatatataataatgtccttgttttccaaagctactaatccttataaaaatttcatggtgttgtatccaaaatatctaagttcggttttgattttttatacaggtttgatttttttttcttctcaaagtaatagtggatatagggtattttcaactagatttcacaaagtaagcatttataggcagattttcaaggtaacccaaaaggtaagttttaggttttacttagtactggaagaggaaaaattaagagtaattaccaactgagtataatttacaatggtgattaatagtctcatagcttccttgtcattcttctgtttagttactaacaattgtatttattattctgctaactttaagtaaacaagcagaagcttttctggggattctgaagtatagttactatcaaaatatagtcgacccttgaacgatgtggggcaagatgccaacccccaaacccccctgcactccccccagcacaatcacaatagaactttgacaaataactttgcatatgactttgaacttccccaaaacttaactactaatagcctactgttgaccagaagccttacctaaaaaatatacagttgattaacatatattttgtatgttttatgttttatatactgtatttctactataaagtaagctgggaaaagaaaatgctattaagaaaatcactatttattacgtagaaatggatcatcataaaggtcttccctgtcttcacactgaataggccgaggagggaggacgagtagggggaggtggtctgctgtctcaggggtggcagacgtggaagaaaatgcatgtataagtggatctgcacagttcaaccctgtgttgttcaaggcactgtatgtacacttttatacaggtaacatttatacagagacttaaaaatgttcacttttaagttcgttcttgtatctcatgttgataccattattttcatatgtgcatttattttcaggtagcacatactatatgccaataggaagttcaagaccctattaattataacagtagaagtcttaagaattcaatgtattgtctctgcatcctagcatgcaatggttgtggcattgagagtctgggcagagagagcaatgtatgtctggttagggtggtttcattaagtttcatgtgatatccttcagtcctaaacctccaaaatcacttttaaagatagcaatgtaaccatatacaatgatatttcagtcttttctgtaaaatgttaaaagtaaaagaaaaaccaatgtagtatcagtgaataaaaagctgcaggaaaatttatttctgtgtgttcagttagaaaagtgtgtttgggaaatacttttcacagtttagctgattgtacaatagcctctgaatttttcttactatccctaaatggtcaagtcagagagcatcattatggtttaaatactggtcagtaaaacacaatggacagttatctgttctgtgattatcttgctgttttcttgtcttgcataacactatagtactgtagcaggcagctattgaaacagtgttgtgattgtctagtttaacggaaggaaaagagcttttgttttcattagttttttaatattccttttgaagaatcactgtcatttaattttggtgcctggcactaagcagcaaatgcaagaggtatgcagactgccaaattttatgtaacagttgatgtgactattgcaagagtttgtggtatttcctgttatcatggttgtttagagaaattttatttcaccctcaccatctagttttctagtctctccttttccctgtggctttattactgatattaataacctgtgcattgattctatatacagtaataatttgtggttctacagaaagatgatccatttgagctggaatcatggtataaactaagaggcactggttacaaagtgtaaatgtaactcacttatgcctgtgacttttgggttatttggatttatttttctgttacttttttgcccacatgcttgttatttggtcatttctgggcttgggtcattgtttggcagatagtaaatgtagattacttgtttttttaactactctggagataaaatatgataacagcatattatctaatgcttcccagtgctccatatgccatttagaagtttggccagaactatgaaagcaaagttcttttgccctggaaaagaagaagcagttgaactcatattcttttccccacctcaaccccttttaaaaaaattttcgattcagggaatacattcaggtttgttacaaggatatattgcatgatgctgaggtttggacttctgttgatcccgtcacccatatagtgaacatagtagtacctgataggaagtttttcagcccttgtccccttcctctgtccccacttttggagtcctcagtttctgttattcccatctttatgtccatgtgtacccagtgtttggctcccacttataaatgagaatatgtgatatctagttttttttctgtgttaattcacctaggaatcactgcaaaatacatgattttgttcttgtttatggctgcttagtatttcatggtgtatgtgtaccacattttcttcatccactccaccattgatgagcgtctaggttgattccatgcctttgctattataaatagtgctgtgataaacatgcaagtgcagttgtctttgtacccatattcttttttttattattatactttaagttttagggtacatgtgcacaatgtgcaggttagttacatacgtatacatgtgccacattggtgtgctgcacccagtaactcgtcatttaacattaggtatatctccaaatgctatccctcccccttccccctaccccacaacaggccccagtgtgtgatgttccccttcctgtgtcccatgtgttctcattgttcaattcccacctatgagtgaggacacgcgatgtttggttttttgtccttgcgatagtttgctgagaatgatggtttccagcttcatccatgtccctacaaaggacatgaactcatcatttttcatggctgcatagtattccatgtgtacccnnnnnnnnnnnnnnnnnnnnnnnnnnnnnnnnnnnnnnnnnnnnnnnnnnnnnnnnnnnnnnnnnnnnnnnnnnnnnnnnnnnnnnnnnnnnnnnnnnnnnnnnnnnnnnnnnnnnnnnnnnnnnnnnnnnnnnnnnnnnnnnnnnnnnnnnnnnnnnnnnnnnnnnnnnnnnnnnnnnnnnnnnnnnnnnnnnnnnnnnnnnnnnnnnnnnnnnnnnnnnnnnnnnnnnnnnnnnnnnnnnnnnnnnnnnnnnnnnnnnnnnnnnnnnnnnnnnnnnnnnnnnnnnnnnnnnnnnnnnnnnnnnnnnnnnnnnnnnnnnnnnnnnnnnnnnnnnnnnnnnnnnnnnnnnnnnnnnnnnnnnnnnnnnnnnnnnnnnnnnnnnnnnnnnnnnnnnnnnnnnnnnnnnnnnnnnnnnnnnnnnnnnnnnnnnnnnnnnnnnnnnnnnnnnnnnnnnnnnnnnnnnnnnnnnnnnnnnnnnnnnnnnnnnnnnnnnnnnnnnnnnnnnnnnnnnnnnnnnnnnnnnnnnnnnnnnnnnnnnnnnnnnnnnnnnnnnnnnnnnnnnnnnnnnnnnnnnnnnnnnnnnnnnnnnnnnnnnnnnnnnnnnnnnnnnnnnnnnnnnnnnnnnnnnnnnnnnnnnnnnnnnnnnnnnnnnnnnnnnnnnnnnnnnnnnnnnnnnnnnnnnnnnnnnnnnnnnnnnnnnnnnnnnnnnnnnnnnnnnnnnnnnnnnnnnnnnnnnnnnnnnnnnnnnnnnnnnnnnnnnnnnnnnnnnnnnnnnnnnnnnnnnnnnnnnnnnnnnnnnnnnnnnnnnnnnnnnnnnnnnnnnnnnnnnnnnnnnnnnnnnnnnnnnnnnnnnnnnnnnnnnnnnnnnnnnnnnnnnnnnnnnnnnnnnnnnnnnnnnnnnnnnnnnnnnnnnnnnnnnnnnnnnnnnnnnnnnnnnnnnnnnnnnnnnnnnnnnnnnnnnnnnnnnnnnnnnnnnnnnnnnnnnnnnnnnnnnnnnnnnnnnnnnnnnnnnnnnnnnnnnnnnnnnnnnnnnnnnnnnnnnnnnnnnnnnnnnnnnnnnnnnnnnnnnnnnnnnnnnnnnnnnnnnnnnnnnnnnnnnnnnnnnnnnnnnnnnnnnnnnnnnnnnnnnnnnnnnnnnnnnnnnnnnnnnnnnnnnnnnnnnnnnnnnnnnnnnnnnnnnnnnnnnnnnnnnnnnnnnnnnnnnnnnnnnnnnnnnnnnnnnnnnnnnnnnnnnnnnnnnnnnnnnnnnnnnnnnnnnnnnnnnnnnnnnnnnnnnnnnnnnnnnnnnnnnnnnnnnnnnnnnnnnnnnnnnnnnnnnnnnnnnnnnnnnnnnnnnnnnnnnnnnnnnnnnnnnnnnnnnnnnnnnnnnnnnnnnnnnnnnnnnnnnnnnnnnnnnnnnnnnnnnnnnnnnnnnnnnnnnnnnnnnnnnnnnnnnnnnnnnnnnnnnnnnnnnnnnnnnnnnnnnnnnnnnnnnnnnnnnnnnnnnnnnnnnnnnnnnnnnnnnnnnnnnnnnnnnnnnnnnnnnnnnnnnnnnnnnnnnnnnnnnnnnnnnnnnnnnnnnnnnnnnnnnnnnnnnnnnnnnctggctaacacagtgaaaccccgcctctactaaacatacaaaaaattagctgggtgtggtggcaggcgcctatagtcccagctactcggacggctgaggcaggagaatggcgtgaacccaggaagcggagcttgcagtgagccgagatcgcaccactgcactccagcctgggtgacagagactccatctcaaaaaaaaaaaaaaaaaaaaagaagattgtgtaccggcagtgaatatatgatctcccttttgacaatcggatattcacaactgagcgtttgtccctatgtcctctgaaagtgatggttggatttataattttttagcaagatccctctggattatgcgtgcatttttggttactagatacagatatacctgaaagccctacttttacattgtaaagtttgttagaattcacattctcttcggtgtgagtgaagatggtgaacctcatagtagtgtaaaaataataaaaaatgtttcaaatctgagcctcaaagaggttggcctgatggattcagtccataaataggacaggtgggtggatggatgatcttaggtaggcttactgactaaagtgacttttaaagaagtttttggaggacagacctttggtggattaataggtttgttccaagcgtagggggtggcataaaagaagatataggcagtagtgggcgagagagacaaaggattcatttaggagaaaacaacagggaatgggacaggatgtgggaggagatgagatcagacataagaattggaaaagagttgtggaccatttaaagacaagaaaaaaagttgtgctttaaatgttgagagccaacactgattagaagtgtgtttgaacatatactccctctaaaagagagaatgctagcagttcagtaagtttcattgtttaataaaaaaagacagtgggcagagcaaaaaataaagtgattattaagtgagtgattatataatttatgatccaaacctggtcactttaagagagtgaaagggatactatttagtgagacaaaatgtgtaaactgggactggacaaatcaagatgtggttatcccattattattaaataatgacttggaattcattaatagatcacaaagacaggaaaaattaaaatcctgagttttgaaagtgacacatcgtaataatcctttaaaaactaaacaggaaggtgtcagattttggtcaggacaagcagaaacagttgctgaggttgatagacaaatgttggtgttttcatagcattgtgcatatggtgcttaggctatgagtcaggctgcctaggcttgagttctagttctgccactgaccagctggtaatcttcagcaagcaagttgggaataacagggaaacctgcccctctgggttgaggccaggtttaaacgaggccatgtgtacacgcaaaatactttgcacagtacatgtcacatgctaagcactcacatgtggctattatttttttctactattactacaataacaactactttttatacattagcagttagcatattttcaatttaaagataaatactttaagctttctgatgttgttgtgagctttctgccttttatttctagcaatatttcagtaattgatgaaataaattcgaaaaactgtttttcattccagctttaatattatgaagctcacattacaacttctacctgtctagactgttcttacttttcataagtagacaagtttctacagtcatataatagaattattgaatacagtaattctcattttacattcaagtaagtcttaaagatgtaatttttagcagcattgtgtttttcaaatccaattcctgctctgtagcagataggttctgttgttgctgtaaatgatagctgaatagtaatcatttaattttctcttttaagaaagatgaaacttttcttggggatgggggatggttcttggcaaacaaaaatgatgtgatttaggtcttttatagaaattcatgagattacttgtaattcaacttgaacatgtccttcttgtatttattgttcctttttattgaaatactctttctcaagattgtgcacaactcacacacacacagcatcttcaggtctttgcttaaatgacacctcctcagtgaagccttccctgaccaccccttccaaaaactaaagcctccttctagcactcctcattccttctgtagctttattttataatgtcataaatgatggttattttagaagccctgtaatagttcttcttacctctgagatatatgcggtggtcccccattatcctcgttttgttttctggggtttcagttacccacaatcaaatgtagtctaaaaatattaaatggaaagtttcagaaatagaaaattcgtaagtttttaattgtgcactgtgctgcatagtgtaattaaattttgccgtgtcccacctggaatgcgaatcatccctttgtgtagtgtatccctgttgtatatgcgacctgcccattagtcacttaacagccattacttagcagccatctcagttatcagatcaaaaaaccatagtatatattgggtttgctactatccatggttttgggaatccactgggggtcttagaatgtatcccccgtggataaggggggaatactgtattgctgcagtatctctgaactctgactctgtgatggaataagggtttgcacttctctactacctcagtaacccagtccttagggaattgagctttcttttataattagtttgcttgtaagagaacttatggaatgtctaatcttagttgggagtgagttgtggccttggctaaggatgaagtgacaatactctttcaagcatagccctctggagaaaaggccacttcccttcccccgccaaaaaaaaaaaaattttgttttttgtttttttgtttttcccaacagaagagtttttactactggagacccaagagccctaacttgctttttagtgggaagagaggaactgcctcatcttaaacacatccctatgtatattagtcagctcaggctcataacaaaataccatagactgagtggcttaaacaacagaagtttattttctcactgttgtagaaactggaagtccaagatcaaagtgccagtagggtggggtctagtggggtctggtgagggccctccccttgggctgcagatggctgccttctcactgcgtgttcacaaggcctcttcttagtacgtgcacagagagagagatctgtggtgtctctttgtatggagacactaatccttttgggtcagagcctcacccttatgacctcattaaccttaattatttccttattccaaatacagcgatactagaggttagggcttcaacataggaaatttgggggagacacatacattcagtccctaacactgtgcatcccaaattatttctgagttcagttcaattaaataaacattttttgagaccctgttaaatgtacaggcactacgctaggcatcaaagaggcagaagtgaactatcccaggctcaagaacttaatatttagtgaaataaaatgtatataattaacttgaaaatgtggtaaatatttttctaagctacattttgaagggtgaatcgaaaattgccaggcaggtttgtataggggagggaagtgagtgtaggccaagcagttaacggaggaacagaatggagtgtgcaggaatgatgagcggactgatgtggagtgaagtaaagagtgatgggcacaaatttagaagtgcaggactgccttgtggtgtttgtccttcctgatggtgccacaacgttttctggaaaagtagcaagtacctaatatgttgattttcacaatgaaggataagttttaaaagactatcaatgactggcatttacaatctacaataagagactagttgtgcaaataaaatacagtgatacaaatcacttaattagtgggattaggtgaataaaatttcccctcaaatacgtagtgttgtatttaaaaaatcacagtgaaatttaaaatactgtggttatcagagatggaaaaaaaatgtgcaatcaccacttcaagtaaggaaaaacattacattaaaaatctttggttttctccagtgttccttaagtttctacgtaaaatatctaaaactgtggggttttcttcacacagatgttcaaaaatcactattcacttccaaccaagatagagtaacagagactggatttacccttctgcctgaaacaacaaccaaaacagacacagtatatagaacagggactttggagacactgggcatcaggcaacaaaagaaacaaatccctgagagatgttagcaattgaggggagccctgtgagtattgagagttcccagaccactgttcagaattatagctaataagccaacaaatagaatcataaaaatactcaacccaaaagaaggcagaaaaatggaaaaaggggaaaaaaagaatcaataggacaaatggaaaactatagcaaaaggatagatataaatgcaaccatatcactaacaccagcaaaagaaagcaggagggacttatcaggcaaagtgacttcagagaggaaacatcaccagaataaagaaaattatttcataacaatgaaggaatcagtgtatcaagaggactattataatcctaaatgtgtactttataacatacacatttgaagcaaaaactaataaaattgcaaggagaaacaaattacagttatagttggagctttcaatatatctttgttattaactaatagaaaaagtagacagaaaatgagtaagagtgtggaagacttaatgctatcaaacaacttcacctcgttgacatttatagaacactccaaccaataacagctccagccaaaacatttgcataggaacatttgccaacaaagaccatattctatgccatcaaacaagtctcagtaagattcaggttataagattcaagtcatggaaagtttgttttctgacaacaatggaattataatagatatcaataatggataactttctggaaaatccccatatatttggaaattaaataacatacttctaaataatccatgaatcaaagaagaaaccaaaagcgatttttaaactaagtgaaaatgaaaatggaacatatcaaatgttgtgggatggctgccactaaagcagtattttaaggggaaggtatagcctgaaatgcctatattggaaagaaagaaagatctcaaatcagtgacttcagctttcaccttaagaaactagaaaaagaacaacaaattaagcccaaaataaaataaaaataataaaaagcaggaatcactgatatagaaaacaaatgcagtagataaaattaaaaccaaaagctcattccttgagaagatcaacaaaaatgataaacctttggccaagattgtatgtggagtaattttgggctgtatcttgaacatatgatggttacacagattaggtatccctaatctaaaaatccaaaatgctccaaaattcagaacgttttgagcaccgacataatactcaaaggaaacattcactggagcattttggatttcaaatttttggatttggtatgttcacctggtaagtatcatgccaatattccaaaatttgcaggaattcaaaattaaaaacacttctggttccaagcatttcagatgaaggaaattcaacctgtattgtggggactctggacaattctattataaaccagctggtttgtgtctcgtaaaacagaataacatgttctctttactgggggatcaaggattaaattaaaatgcatttatgtaaaaattaaagattttttcattggcatataaatatagttctgagtgatctcaaaatcatgctgttccacggaaacattcattttgctttgggtttctctcataaatcatcttaacttttatccttgactttttcttaccagagcacatctcttttgtttaaaatacccatctaactccaacacgaccttgactctagatggtttgctgcatttcatgacgtggtatttccagtgattctccaaatcagaaactgcatactaacggcctgcagcctggactcaggctagagaggtgctgtgtttggtttgcacagttttttttgtttgtttggttttggttttttgaagttagaatttgttgctaacatataacaagttggaatagctggcaatgcagagcccacagtcctccatgccagaaatcaattggaactgaatggtgactttttccataggttctctcttaagggtttttacattaattccctcaatttaaccatcacagcaactcttaactgccaccatcattatcaccaagtataaggaaactgagtctcagaaaaattaagtgtcagaaatcccatgagctattaaatggaggagtgggtgtttaaatacaaatgtgtctgaattagcctatattcctttctgcataacatcaaaaatgaggttattttatctttcagttgaaaaatcattggtatccataaatattatatgatgctagctgtagtgccccaggtatcaagtttatcatgttaaattgtgcaaggttaaaatttacaatcatttatcaattttctttaagttccttaatgtggagtttaccataggctactttctcatttctagaatattgacatttgttgcctgtactgtccatataggttactgataaataattgagaaaggtgttcactttaacattgttttcctatttaaattctttatttaatatgattcccatttatgaaaataacaactaatcactaccagagaacgaggatgggcactgacatctatagttttctggtttcaaaaggaacacagaaattaaacttcattttgaataaaagctgtccatgatttagataataatttatatctcttatcaagaaaaaagtcttccttacaaagatagacttgtatattctagcttaataaatatttactttttgactgaacagattagattctttaatctgggactgtttgtttctatctaactagcattgttatcagactagagttaggtttttccatacaacagatcacttgacaaataattaaatacatctattatacaaaagtaaactggaattaaatactaacatttatagtctaggtcatgtaatttcctctaccaaaagtaaggaaaatattaaccctctccactttagtataaactttaaagaagttcaacagattcatgctttgaataaagtatcttttgctttctttttttgccttaagtggaaatgatggtgctggtagtaagagattattttactgttgctatctctgctgattaagaatgaacaaaatatcaaagcatttacatacagaggaagcagtagatacttcgtgttaaacagaccttgggcaatttactttccctcagctcccttctctgtaaaatagggatagtaatatctaccttatgttgacaatgatttctctaaagacccaatcctgtatttgttgtgtaatagatactctatagatggtaactataagcctattcatcgttgttgtcatcatcatcatcatcatcacaacaaaataactttatggttttgacagacctgaagatatattgtgtggtaactatatattccaagtcaaaagttgtgacatggtttgtaagcaaatggtagaatcacattaggtgacattttaagtactcagtatatcaagaaactttacagtaggtgtcttaaattggacactgttcaaacaaattagaaatggagacactctttaagcctaatagatctttactgaatattggtcaaatctccttatcagttgtaattacagtacagtgaaaagtctgtgtaacccaaagctactgagcttcagattttaaataactcatagcaaaataaagttcagtaatagtctcatacatgaaggcagtgagatcattatggaatggaaagagcactggattgggagtcaaaagaccagagttgttctggctctcagaaagctttgtgactgtggtctagttgtcacctctcttgtttttcatcaacactcaaagaagggagctggattacattgtgaagatcccaaatataatgtatcaatgcccttcagtgtgctgtaatgggaattaactgtagcttttgagccagcagagggagcacgaagcatgaatttatgtctgggttttaggaaaatgggggcgtggtgggggggttacatggttaaacattaattacagttcttaaaatagattatttcctatcaggttatacccaacttgatttgatctataatattatctggagatggtggcattcttaaaactactgatagaattctacctctgtaattatcggtagttataataaaggactatattccaaaagtacatttaatccatggttatttctgaggattactatcgtttattttctctattgttagtgtatttttattagaaagaattataattttatcattttggaaatattctgttgatattgaaataactgggctatttgaaaccataagaatctttaagtgatacatcatttatctagcattcttgggaattgtgcagttccacatattttccaaataacaaaagtatgtttcactaaagcgccaccttaaaaatgttagaaagtatttgggatagagatcttgctattgcagacttttaggagtttgaagtaaagaccttacacacatttgaatctttttctcattgctgcagggttgttgatttgagcatgtactgatgtactaaaccatagtggaattctgagtttgctccttctttgatgttgaggcccatttttctctttttggtcacactactcttagatttttcccatttccacatattcccattctggttttcctttcttctttgttgcttttattatttagaagctttcactgaggaagccagtaactgagctttctgagaactgtgttaaattaagattctaatttaaggcctaaggagttaaatccatggctttcctataggcattgataacaacttcattcatggaaattgttctctctttgtggtttcggtttatgtattaagaggttggaaagggagctacttctttattcaggatgagtcacagtagagatgggtttcttatgaagttactgtaaatatatgattggttttgtggtttttctaaaaagtagttttagaactttaactcaaagaatatcttatccaccagtcagtagatagtttatttaaaaggaaaatgagggatcattaacccactgaaaccattggtatatacaggaggcattgtggaagtgttaaaagaagaaaagaggaatggacatctgtgcccttgaacttgtattcacataagaaatgagacaaacctacaaacaaaagataaaggaagacatgggaaaaatgtgtaggacaagtataaattaataattaggtacacaaagatcaaaaggaagttgaaataaatggataaagtttttacagacataagatttttttatagtgatgaagctaataggtgttgaaaaaaggcatttaccagtaaagacctataattccagttaaggcttcctgttcctatggccatcccaaagactaattatattcactaaattaagattaagggctaagcaaaaaagaaatttcaaagttccagttgagattctcaaattaagggtccaacacctgggaaatattttggctatcaattgtgttataacgtagttataggtactctgcagcatttccccaaagttagcagtatcatgtttcctgtgactatctttgtaaaatctgacatatagtaaacatgctttatttggtaggtttcccctgagaggaaatttctttacacttaggaagtgccttatgacctgtgataataataacttctaccctgccatcctggctcctcttgcactcactgtgaggtcattccactttccaaatgaattttctctttcaatgttatttcgatcccaattattcccataaattagtgacactgtgccataggatttttaaaaaactggacagatttgctatttccttggtgtgcaattttctcaagagactaagaaagggtcaccgaaaaagacaaccaaacttctttcaagtcagaaaatctctttctttacagaacataattttctaatagagaaaataccataaaacttctaataagatcgatatctttagaattgcatactaattataaaaaattagactttcatcgtagtttagtttataaaggatatatacatttttaaaatccattgtccatgaaatatgtataaaaggagtaaagtgctttttagataaattaccaatttttaattttgtaatttttgctaaataacatttctgaccaaatctagtcaaaattggaaagaagccaagcacagtggctcacacctataatcccagcactttgggaggctgaagtgggaggatcatttgaggccagaagttcaagaccagtgcgggcaacaaggcaagacctcatctctgcaaaaaaaaaaaaaaaaaaaaagccaggcttggtgacacgtgcctgttgtcccagctattcaggaggctgaagctggagaatcacttgggtccagaagcttgaggctgtcatgagctatgattgcaccactgtactctagcctggtcaacagaatgagaccctgtttcttaaaaaaaaaattgaaaaaaaatgtgcttatgttaaaaacacaaatgaaatttgcatgaatgtttttgtggaaaatgaaaataattgtctttaagctaatgttagattctcttatttcagtctcttataaatttggtagtatagttaccagagtgtatattgacagattgtgtattttacctattattttcaacatattttatcagcaataatttttgtaacatcattttttaagttgttagccatctttcagttttctttctatgtcttccacattttgactttagttaccttagctaggggaaattcaattcctgagtttcagcatttttttaaagaaacattgtttagtccaatactttgccatgttgtatgactagttattattgggtttacatataatttttgattatgcagtcataccatgaaggtcatactgaatgttgtactataattttgagttcttgctaagatacattatgtgtttttaggattctaggattggcttctccagttacaatgcagggtgtgcccttttggtgggaacctctttcactaaatatcacacatatatttctttgtcttttgcttttactatatatagagtttttgaagaagatgagttattgtgttttctttatagtgttgaaatatggagcagtaggttctactagaacatgtgtggtgcttagtgtactgatggacacatctgttgtccatgcattatgctgtgtactgctagtcacaagacatttgcattttaacaagcattacttgacagtcagcaagctggtggtgctgagttttgttattttgttctccaccttttattccataaaatcaacatcattttagctcttgtcctggatggaaatgaattttaagctagttattataaacctaaaataatgtttatggttagtaaggcaattaaatgtgaatgaacgggcagtttaccctgccctaaccttgcttctttgtataaatgtcagtgttcttagtaaagattgttacgtaattagtctttccttcattttaacttttggtccttaaagataagatttttaaactaaaatcaactaagactgcttgtttctgattttgtaaggcaagaataccgacgtcattgcagtttcttttattggagtaagaacgatagaaaagaagataaatcatcaattagtagtaagcatattttagaccatgttgtgcgcagaacactgtccaaggatctacaatcaaggccttaaatgaacttggcatttggaaaaatacatgtttacagtacaaatatgcattacacttgtgtgtagcagtttaagagcaactatgaagccgcatattgaagcaaacaaataattaagatgacataatttgatagagaaaaaaagcttgggaagttactatttctattataatctgcaagtaaaaagagacaagtttcataacatgaatttgttctgtcttcgtcggctttgatgtttttttctgttatggtgtattaatcctcacatgttttccgtatttgttagaaccatcgttatctgtccctttcttcttcagccttttccctcagttctcgctctctctctgtctcagcttaagttcacttcattctctcttcttgcacatgggttttctctgtgaagctaagcgtgaccatagccaactccgggattacgtctttacaatcttctaaccagagagaaaaagcagctttctcaccctttctagttagtaaaatcctagggaatatttccagctggctcaactagagcttatattcattgaccaatctttgtgactcagggaatgagcctgtgtcataatctcacttttttcaggaaagtagtttctgtttctgaaagtagggggtgagagtgaatcatattggacaagaaaaatagccatcataattaataaatctccatataagagataatgaagtagtgtaatgagtccatggtctagactcggattaccaggctgtgaattctagctcttccatttatgaatagtatagtccttggcaagttaatttacttctgtatgtcatcacttataatgtgatgttaataataatactgtcttcattaaggagttgtatatttagttaacaaatgtaaaaggttagagagatgtgtggcatagagcacattctcagtaagtgctagctgccatcattcttattatctacatcatcatcatagaaaaagataccattgggacccatcctaggaattgtaagtctggtttaacatgccataatcaatcagtaccatccactattttattagacttaaaaagaaaactatatgatcatctcagtaggtacagaaaaagcatttgacaaaattcaatggccatttatgaaaagaaatgaaaccagctttcacataacaaggaatagagggaatttcttcaacctgacaaagagcatcaatgaaaaccttacagctaaaatcatacttagtgaaaaatgatacttttcccctaagatcaggaaaatggcaagaatatgtactctgacctttattcagtattgtactataggtcctagccagtgccataagtcaagaaacagaaatttttaatatccagattagaaaagaagatttagaactatcttttaaattttattaactatttagctatttgcacaagacatgaatatgtgttttaaaagtcctaatgaatctacaagaaacctactaggatttctaaatgagtttagcaggatcataggacacaaaaaggtcagtatataataattttattgttgaatttactgttaaatttgttattgtcagcatatagcaaatttatttctacattcttgctatgaacaatcagtaattgaaaaataatgccatttacggcagcatcaaaaatatgaaataacttaagaatagacttaaaatacattcaagacctggtacactgaaaactataaaacattgctgaaagaaattaaggaagacctaagtaaacagggtgattttatcctcatggattagagacttagtattgttaagatcctgaaattgatctatacgttgaacacaatcctaatcaaaaccttaccaggtgatttggtagaaaatgacaagttgattcaatattatacaaaggacctagaatagccaaaagcaattttgacaaagcctaagttggaagactcacactacctgatttcaagatttactataaagctggtgtaatcaagacagtgggataatagtgtatgacagatttatggaccaatggaattgaatagaatcaagaaatagaccagtgcatatatgctcaatgaaatttcaacaagggtgccaaggtaatttaagggggaaaggataatcttttcaacaaatggtactggaacaattaaatagctatatgcacaaattaaaaaaaaaacacccaaaccaattaaataaattgtgactcttcatgccatatacacatattaatgcaaaatggatcatagacataaatataagaactaaaactataaaacttaaaacttaactgtaaaactatagaagaaatcatagaaaatctttgggatcttggattaggcaaagatttcttagataggacataaaaaacaaacaattttttaaaaatgtgatgaactgatgaatttcatcaaatttaaaatttttgctcttcaaaagacactgttttttgaagaaaatgaaaaagacaaactgccccactaccaccacccacaggccatagactgggagaaaatgtttacaaaacttatacctgataaagaacttgtatccagaatatataaagaactcttacaactcagggagaagaaaaacaacccattgttttaaatgggcaaagatttgaatagacacttcaccaaagacaacatatgagcactagaaaactcatttggaaaatgcaaattaaaaccacaaagaaaattacttcacacccactaaaatggctaaagtgaaaaagactgaaatgccaagtgttagcaagaatgtgcaacggtttagcagtttcttatagagtgaaacaaataacatacaatccagcaatcttactcataggtatgtattcaagagaaatgaaaacatatgttcacacaaaaacctgtacaactgtttacagcagccttcttaatagaccaacactgataaataaagaaatcgaggcacgtctgtgcaatggaaaactactcagcaataaaaaggaatgaattactgatatacaaaacagcatggatgcatttgaaaagcattatgctgagtgatagatggcagacacaaaagagtacctaaggtataattctatttgcagaaaattttagaaaaggcaactacagtgacaggaagcagatcagtggttgcctggaagggtgaggggaagggtattggagcaggagattgagtgtaaaagagcccaaggaaactttttggggtaatggaaatggtctgtatcattattgtagtgatggattacatgaatgtttacatttttcaaaaacatttttcattgcactgtctacttaaaatttgtgagttttattatataaagattatttctcaataaagctgattaaaactaaggtaaccagtagcatagggctgtcattaaggaccaccagtggttcagaagcagggagagcacaggtttgagaaatctttcccagagggtgtggaatcggtggtatgggggctgtaaggacttgtaggagaggaggaaggaggggtgtctacacgtagagggaatcagtgtctacagatgagagcatgacacttggtgtgagatttggtttgtagctcccactccacctctaataattttaatagttttttggttttttttattttttattgttttacattttagtagctctttaggatttataaagaacttttgtattcactacataatgtaaatttgatcacgggtcaagcacctaactctctacacctaggtttctttatctgtaaatcatctgctcccaggtcttttgtggagttcagttacttctcttttcccctatgactgctgttactagtgtgttagaggaaggactgaggcatggagagagaagttggctgagagttgtgaggattggcagggctctcataggaaatgtctgaaactttcaaagacagaacctccacaccccctcccagtaagtgacctttctgtgatgcgttccctttaccttcggagcattactctagcactctgctccccagcaatgttcaacttcttaaaaatctacacctattttctgtacttcctcacatcctgcttatttctcaagcgctgcagtccagcttccgcctcctcctcccctctgacagtggataaagtcaccactgatttgtttccttgtgccaaatccagtgacttcgttttttgtttttttgttgttgttgggttttgtttttgtttgtacgtttgtttttggtaaatcctactttactatttgacagcttttaacagtgatgattatttcctccttaaaattgttctcttggcttccagaatgtctttctttcctagttcttctcctacttcttatttaagtgaccctttctggcctctgttcaccctttcggtcttggtgtttcccacagttgctttnnnnnnnnnnnnnnnnnnnnaaagtttttttttccaaagtttttcccaaattttaaataaaggaacccctttgggccccgtttaacccctcgggtttgggggtttccccaaaggggtttttttttttttttttttttttttttgagacggagtctcactttgttgcccaggctggagtgcagcacttgagaatctcagctcactgcaacctctgcctcccaggttcaagaattctcctgcctcagcctcctgagtagctgggattacaggcacgtgccaccacgcccagctagtttttgtatttttattagagatggggtttcaccatgttggtcaggctggtctgaaattcctgacctcatgatccacccgcctcagcctcccaaagcgctgggattacaggtgtgagccagcacacccgacctcatacagttctttcttacattacacaatatccttgggtgatcacctccacttttgtgattgcagctgatgcaaatagcctaaaatttctcctcccctctcttctgagcaccaaattagtatttctaaactgcccatctgcttctttctgaccatctccacctgttgttcctgagcacctgtaggtttcctagaagatttgttaagagcacagattctagagccagcaatgctagcattgactcctgactccaccacttagctgtgtgcctgggcaaattactctctctggttcaattccatcatctatttataaaagggggagggagaatggataatggtaggacctacctcacatggttgttagatggacagcacctgatatataactcataactgctgctactgttattaatttctttttcttcctgagcgctctccctccctttcaacttgttgtattcctagcatgtcagtcaccttatcagctagccactgtgtttcccaagttagagacctcagtcagccctgattcccttctttcccgctccatgctgtctctgccttccacatagctcccatttgctttaaggcatcctcatctctttatttggataatatggacgtttcctaaaggttctgtttctagtcttgttcacttgtcatctcctgtccatccttttctccaggagcagaggagtctttctaaaacaagtagaattttatacacttggcccacattgctcaggtcagtggttttcaaccttcggttctaggagccctgaagttccatggtagagactctgtggccaccatagatggcagggcatagggaggaggcttaggacatagaggcacaaggagtaatctgccatccttactgctgagccctgcctcccacctcacacctcaataccaaacacagcagttttgcgttgatcactttctcatattgtagtcctgctttcatagaacacgtctggctttcaggatgaagtccaaggtctgagagagacatgaggcagttgataagccatcctcactgctacccagcctcattgctgtgctctgctgtgtactcaacacttgatgcacgtgcagtgctgtttcccccacccacaggactcgtatttctctgcccaactcacctttgtgattgcctgatttgctcagctgactcctaattgtttcttaagaagcagtgcaggcatcatctcccaaagtgattgcctctttctcccttcaggtgcagttgagcagtcctcacctgtgttcccctaacattccatgttcacctccagtctatttaggcacgtcctttctcacctgactgcgccctctggggaggcaggacagaaactgtgttgcttttgctttcacattgcctggcacatactaggcgctgggtaaatatttgactcactgtctgtctcaatggctgagcaagatgaaatgcagacctcttagcatggtccatgtggccttcttatttggcccctcttgtcttaccggcttcatttcttgccacttctcacccctgtgagttttctctattcttgccttataagttatgggtatttccttgaaatctcccagtgcctttctaaacactttcccccttctgaattactcttcctccccgtttgcttttccaaatagcaagtcctctaaccttcaaggccacagtcaagatagatttcctctgtggaatgcacctaatcttccccctgttctcccacagcgctctcttcagacccatggaattctctgatttcagtattgtaaaaattttttttttctcatcccagtagacttgagttccttgggggcggggagccatgtctctttcattattttgtaagaattagcttctcactccgaatagaataaaagtccagggcttttgatgtgccataaagcggcccttcacagtctggcttcaaactgtcttcattctggtgtcatctcctgccaccatctgtgtaccctacactacagccatttccaccagcttgtgattttctcagcgtgttcccgtttggactgaccacacttattctgtttacatgctgctttcttttgtgaaatgctgtcattggcaggggctctgttttcttcaagatagcatgttctttttatcagatttttaaaacgttatataatacttcctgcatacacaaaaaatagagcaatataccactctctcatgtatgtatccagtgttacctaagaacattttatatatactgtatatgtgtccatatatatatatagagagagagagggagtactcatgtgagagctggactccctttttcctccttcctcagagaacagtggctatcctaagtgtaggatttatcatttccatatatatttgatgttattaatatattttatctgtaaatgatgtgtaatattgtttttcattttaaaaacataaaatcagcttgttcatattttctaaggattcctgcttatttttttactcaacattgtttttgagatttattcatattcatacatgtagcattagataattttaaattgctgtataatatttccttgtataactatcccacagtttatttacccattctgttcttgattagtgttttggctgttttcattttttaaatttgtaatgaacattcttatgcaaaaagaaaaactagtctttttcaaattttaaaaaagtattctagcaaatagatcccagctaagtgaatattaagctaacttaaagatcatttttatttttaagactgatttttaaaatcaaatttatccatttacatacaaacatcatatatctttattccttattctgattagcattaagctgggggtaagtacgttgaatgcaaagctttaagcaaaagttactcttttcactaagcagtttgcaagtcatgtctcgtatacattttgccttaaaaatgttaaataaaagccaaaattataatgtttaaataaaactttgaaagtacttgctataagattttagtaaaatgcctgttaaattgtatgatagtaacaaaggaagtgtgcattctctgtttctcttcgatggagagctgaatgtgacctcaaatgatctattcttacagagaatttcttaaagatagctagaagcagtatccacagcttcttggggtataccatttcaacatttgtgtccttagtagtaaaattttccattatgctcaaccaaaatatctcatgtttgaattgaagctcacttccttgtttggtgtcctactagcaagcaaaacagagtgttcatactctcttttaaaatcagtaaacaaacaaactagcctttcttctctaaaagaaacagtttcaagtgttttttgctctggtccctaggactgtttaataattttcttaaattgataatgagagttactatagatcacctctattgttctctgatagtgcactaataggggacacaggcgcgcacacacacacacacacacacacacacacacacacggaatgtgagaatgaacatcccaggtttgctaaactcaggaagcacctcctgagttcttattttttcttcaactaagcaaagtatgctgctgtgcttcacttgttccatttcttcttcctaacaccaagaagctcacttctttcaggcatatttattgcttttctttttttgtttgggtagccaatttatgtttttgagtcttgccacaccttgtgcaagaattgactacccaaagttcttttagcctcaaaaaatttctgaaattccatttattccagaaaatatactgcaactaattagaagcgtattactgatttccttctgtatgcatttccatgtaaacatgtcttataaacaatcccaatttttttacctttttttttttgcatctcctgcaaaataatttacatactcgaaaatatggaccccctaatgcagttcagtattatgttcagttactcttactcagcagttttgcttcaggcaatttatccaaaagatagtctcactcaggcatgctaaaacttatttacaagggtgttcatttcaatgctgtttataatataaaaatttggaaacaattgcagtgagtgattaataatggactaaataaattacggtatatccatatcctttgatatcaagtaacagtaaacactcatgtgtttgttgaatgaatgaaggaatatattgttagatagacaaagtgaaaggtacagcatagtatatatttcatggaataacaaagatggatatatatgtatacagtatgcatttgtttacatgcattaatgcatataaggtttctggaatcatacacaataaacttaatattagttatcagtgggtcatgagaataacgatgagtggaaagtatggtgtttactgttaaccttaaaaaggaaagataaagcaaaactaaacctcaaatggagaagacccagaaaaataaaatgattggaaaaaagtgtgtgtgctcttatgtactgaattctgttttctacttcttgtatagtacctccattccaattttcttgctctctcctacttttgcctctgtgctttgccttctatttggaagtggcttttattctctcttgcacagataactctttcttctttttcaagacattgggtagggcctaaggtgaccttcatgaaacttcactggagtatttcatttcagaagtgtttcatttcaaagaaatcgttcgttcagatatatcctcagcatgtaaccagtatcataaaatttcatacttattcattcagtaattacttcatgtaattatttttcttcccactttatttaagtataaatgtaaataatattcattgcctctgttatgtttgttttgtacaacatctaacattaccaataaatgttaaggaatttttttccttgatgatatgagttgaaacttaatctagaaagactacttagtggccctgtcttcaatggatatcctttttaaaccatctgaaataattacagattttcctaaattgatatttaaatattttatttgtaaggggattactaaatactacagtgaagttttggcataaaaaaatactaaaggccatacttcagatttttatgggaagtacatggaatcagaattgcctttgtttttaagctgccatctatcccaaagaagaatcctttctttatttgatacaataaatttaatattgggatcatataattataatacatacctctgaagttcttttattaggcacataagtatttaggattgttatgttttcatggtaaactggctttcatcattataaaatctccctctttatctctagtaataataatattgttcttaagcctactttgtcggaaattaacatggccattccaacttccttatgattaatgtttttatagtatgtcttttttgtatccttttgttaacttgtctgtatctttaaatttacaaatgtgtctcttttaaactgcacatggttgggtctcgcttttttatccagtctgaaaatctctgacatttaactggagtgtttagtgcatttatatttaatgtaaatcaactgtattctttgaagattgtttgttttgctctattagggtgcctcttagaataaagtaatttgcactctagaatagaatagtctgactcctaaagcatggcctttctaagcattcaactaaatgttcatgttcattgatttttatcttctggctggttggagctccaatatccctcagtctgttatggtccccaaaatctctgtttaatttacagctcctgggtagttgtttactgccacaccttgtggagtcttgctctgcacattacagcttaacatttatacaaacattcaagaagacacttggatttctggacctgctttctggaaattctctcctctctagtattccaccttgcaaaatgcagttgccacagcagtgttaaattcctctctctgccttagctcagcacaacactgctgtgtactctttgggtcccaccttcctggaccatagtctgcaatgttcctcgagacagaagctcaccattatggggctcatcttcatctcccttttgttagggattataatcctttacttcacatgttgtgttacatctgaaaacagttgtgtcattttttttttttagttttcagttagtgatagcaggagagttagtccagtatcagttaatctgtcatggccagaagcagaaatcttataaaacattttgaatcattatttttgagaaataaagctataatacagaaccatagactctgtatgacagtagagaaataatcttgtccaacacactttttcagaagatgagaaaatacacaagctcaagtgacttgtagtagattgcactatgagttagtcatagtctacatctcaggtttttgccactattcttttccctatagtaatcttatgaaaaatgctcctgtgtttgaaacataattttaaactgtcattaaaaaattttttagaattcttatgatttaaacatcctccccactccttttttcttacataaatactattattaatcttgctgttaacacaggcatgaagaaagaatcatttacaagtatattttagaataattgacatgctgtggaactatatatttccacagaagacagaaaagaaaacagttcctttaatataattggttttttgtttgtttttccagtttattttctttgctgtctaaaaaacacaacaaagttctggaacaagccacacagtccttgagaggttcgctgagttctaatgatgttcctctaccagattatgtaagtagttaccttattcatcaataaaaaattttcctttcagccaggcacagtaactcctgcctgtaatcccagcactttgggaggccgaggcagatggatcacttggtcgggagttcaagaccagcctggccaacatggtgaaaccccatctctactaaaaatgcaaaaattagctgggtgtggtggtgcacacctgtagtcccagctatttgggaggccgaggcaggagaatcacttgaatccgggaggcagaggttgcagtgagctgagatcatgcccctgcactgtagcctgggtgacacagtaagactctgcatctcaaaaaaataataaataaataaattatttcattgtaaaatttataatagcattacccctctcttctcaagattttactgtgctgaaaatctttgctgcccaagaaacctctaatatgcaaatagaagagtgatgtctcaaatcaagggaacaagttgtaaatgattgttaacaagtggttgaagaaaatcaaccttaaaccaataatttgtacataattaagaatctttatatctgagttgagaaacccactcaagctaataacacaaaaacaaaagcagggatgattttataggaagtatgcaaagattccttattgaacttaaggggagcaagtacacctggatttcccagagatctggaacctaaaattgaaaagccattgggtcctgttttgggggtcatttcgtttctggtctctgcttccttttgcttctgctttattctgctgctgctttctaccatccaggtttatctgtttgcttacttggacctaaaatagcaaccccagcccttcctcttcttccctccaaccttgtgagtgcagtgcctttagctgtcttaaagtcttaaagtcctcattctcaattcctgagaaagagaatctaattggctctgctctcatcagggtgtgactccagtcttaccagacatggtcagaagagagcagcagtaacatgtggcctttgttccatccaccttaatgacgaagagtttattaccaactgctacggttgaatgtgccatccaaaactcatgttgaaacttaatccccagtgtggcagtattgagaagtgggaccttgaataggtgattggatcccttataaatggattaatgaattcatggatcaatagattagtgagttaatggattaataggttagcataggaggggaactagtagctttataagaagaggaagagagacttgagctagcatgttagcatgcactgtgtgataccctgcatcatcttgggatgccacagagagtcaccactagcaagaaggttctcaccagctgcatctccttgaccatggccttcccagcctccataactgtataaattcctttttctttataaattacctagtttcaggtattctgttctaaccgacagaaaatgcactaagacatcacctgaccttagaggatgctgatggaatagaatagaaacagcacaggggtgagcataatataataataggaaagagaatgtgttataaattttcttaaagtagtgtgactacctgtgacatttcttacattttggaatatggctttgatgaagatgctaaaaattatcttgccattaaccacaggagaagttcatcaagttctaataaggacagctctaaatctccagacaacaacatagtggattggtatttagaaactttattagagaactctttagttctgagtttgcagtgatgatgcataccagacagctgtagagttgccttgcttctttcctgtggtttgtttcatttctaaatggttgtcctgatatgagactgtgggaacagtacccagtccagatatcagtcaatgataaacaaagatagctgtgtgcagccacagcctgactggtgctagttttttctcgtgtgtgtgtgggtatgtgatgtcacaatctgtcatccccttaaggtattaagtttataattccaaaatgtatcttttaagattttcctgttaagttgaatgttctaattttttaattagcataacagctcgcttaattctacacttgccatacctgtgataagaaaaatatatctagtaactgtttagaaaccctatcggggccagggtggcaatggggagttgggtttaccaaaaacttgaatttgggtcatctgcaaatgttttgttatttataagcaattattatttgatttatgtagtattcctgtgccatttactccacaaaaatgtgttgaatatgtatagttctgaagttctgatgttgccttagtagcattcttctttaatcagagatctataaaattaatatttgaggaaataggtcatatttactggtatttgccaaccatggaggtaattatgccatgataggacaatttgaatttgtaacagtcctgtgaattctgctactgaagtttacagattttagagtcactgattgaatattttcttcttgtataaaattttcactaagtaaaaatgaatttcttaaagcatctgcttctagaaatagtgggaaaattccatttggaatctgtcattgacaatccttttttttttttttcttaacatttatgtgtatgagactttgtaaatcacaacattttccaaatgggtttatgaacttgaattttgctgccttttctcagatttaattgaagagaatggttagcactgattcagtaggagagatgactgtgaatcactcctgatagagacctgaaaggtgattaaacaaacagcagtaaccttaaaaataagcaccgttgtatgttctttcatgatacttcaatgttttgttggtcattcccattgctcaaaacactgttgtataagtgatttacacatttgaaaccattttctcttttacattagtcattaactgggaaaatgaacatgttccttccttttctttcacagaagttttacttaagtacctttgccagtaaccacataaaattctgtgtcctggactaatgctttaaaccacttgttggtaaaagatgaaaaaggaaaatgagaaggtcttaatgcagcagtggattcctagatgtgtacttttttttttttttttttgagacagagtctcacgacgtgtactttctacaccaagactgaatgtactgtattagcagagtttgaataagtacttaaaaataaggacatgtttttcttctcactgtagtacatagagtactttcagtctacctagagatttctaagtttattaagaaaatgtttatcctcattatactgtataattcacaaatcagttgagtaacaacatagaaagcaaatcgcaagttccaaaaacattagtattagtactttagtgcaactatgttggtctgaacatctctagggaaacctgaaaccttcaactgagttccagataatgaggaaactgccctggctgtttaaggggaaataaaacaaaaattgtactcaagcctgtggggggagagaatgccactacaggggcagtaagggagtttaagaaagcaaataaagttccattgacttggctttgctttggtgtttgtatgatcaggattacatacaatttaattcagtgactaacagggacaggagagaattgttaaaggagaatctttcaacagatttttttttaataaaaatgaactgaactttcagagaagtttggtcatatataaccaaatatggaacctgaatatagaaaatgaaacaaagataataaatcagttatgaatgctttttaagctataaccatatgaatatttataaccaatgaggaatattgttactgtaccatataagctttgtttccctagttcctaacaatttaacttttattctagttgcaaccataaggaaccaaattatattgccctgtggtcatcaaataactttgaatctttctgtaggactgactctaccacctaactccaaaatgtagagattgggtctcactatattgcccaggctgctcttgaactcctggcctcaagtgattgtcctgccttgtcttcccaaggtgctaggattacaggcatgagccactgtgccctacagatagcttgcttctaaactgtaactttctaaagagtaaaagccatccatatgaaatttattttcatcaagtcatgatcacttattattatcattctatatggaattctaagataccgttaactctggactatatcactggctgaccttttgacttcatagcttttattaataatcttttagaccttgtttacaaacttttaaatctgctttcagacatttagtttcttcagaaatgtattataggatattctgatctgattttcatatgacaaaatttaaattcagagatgtttctattttccaccccatcctttttaggttgttctattattaagattctgtgtggtgtttactctttaacttagatctcaaattcatttgactcaatagttgatggataaataatattgaaaactatcttcagtcaattgttttgtacaatgtttgtgcctttactgagctagtgttaaaatgcccctttgtacacacacgtacataaataatacaaagatatacatacatattgtttgtatataatggtattagagtattcttttttaaatttttatgggtagatagtagatgtatatatttatagggtacatgagatattttaatacccacgtacaatgagtaatatcaggatgaatggggtaaccatttatcctttctttgtgttacaaacaatccaattatgctcttttagttatttcaaaatgtacaataaattattgttagctgtaatcaccctgttgtgctattatcaaatactagatcttcttgattctatccaactatatttttttactccttaatcatcccctccctgccccaactacccttcgcagcctctggtaaccatccttcttgttaagtgaaacaagccaggcacaaacaaacaaacatcacacgttcttacttatttatgggagctaaaaattaatacaactgaactcatgaagacagagagtagaataatggtattagttcttgatggaaatgtcccttaaagatttttctggaagatttaaaggctggggtaggtaatttaacacttacataacatgggaacagttatcttagtaggtatgctgtcatatccaagaagtttgaaaagctgaaatttgttactcttaaaacagctcctttcacatgttgtcacttttgacaattgcttttgggggtcaacttttcatgcatttattctagtgatgataacagcaatcagaatattattaaaacttttgttttacattactttaccatggtataagaggtaaaaatgaagaaggcatagtacctacttacaggatagttaaaacagatacacaactaaaatacaattcaacatataaccaattttataaaagctacagaaccaaacttgtgggttgtcagaagagaaagtgagagagaaaaacttttaggaagaaggggaggtactgtggcagtcttcattgaaaggagttgaaatttgagctgggtaatatttttcaaaggagagattcaggcaggaaaacattccaggtgttatgcttcttcaaagagggcatgaaagtgaaaaatggtcttgtgtcattgtcactgagttgtttgtatccagcacagtgtctggtgtataataggtgttcagtaattatttgtcacccctcactcattctatacacaagaattaactcaaaatggaccatagacctaaatgtcagagccaacattatacaacttttagaataaaatatgattaaaccttcatgactttgggttaggcaaagacttcttaggtgatgccaaaaactcaagtgacaaaagaaaaatagataaattagacttcatcaaaatttaaaactttgtgtttcaaaggatgcaattaagaaagcaaaaagacaatctacagaatgggagaggatatttgcaaataatccatctgataagggactagtatctataatatgtgaagagatcaataataaaaagataatggaattttaaaatgggcaaatattatattttgtgaactggttctgtggcttgtgacctgtgtggccttaagtatgtcattttgcctcactgggcctcaattaccttttctgtactatgatggccagaaccaaaaagacaaataataatgagaattgaacacctggggttcttttgaggattaaatgaatgaggtaggatccttggcatgaagcaagtgcttgataaggttagctattacagttatgccatgctgcctatgtgtgggagagacagtctgggaccacaggtgttagttcagaagatggaactgtctctgagctctttagtgcagaaagagcttctgcaggaggaggagtggtgtgatattagatggagaggtagagatcacaacagccagcagtcactaactacaggtgagcagcaacatctggaggattttctaatctgtctgggaacatctgggtagttacttgacatcacagcgtgtacctgaaccccaaagatggactccctcttcccagggtgcttcctgaccttggaattcccaaggtcaggcatgtccaggagccccagaaataagccaaaccagagtgaccaccaagaacaaagaaatgggggccatgttggcaggcttcctgtcaaccagctgcttttcctgaatgccaggcatgtgccaggcaccccactttaggtgaggcaaagactttaggtgaggcagagactggccagatgctccacaaaacccatttcctctccctgattacacagcaaagcaacattttccagctcccttgcatctaggaggggggcatatgactagctctaagtcagtggaatgtaggtagaaatgctgtcttccacactttttttttttttttttttttttgagacagcgttttcactctgtcgcccaggctggagcacagtggcatgatgtcagctcactgcagcctctgcctcctgggttcaagcaattctcctgcctcagcctcccaagtagctgggactataggcatgcaccaccacgccctactcatatttgtatttttagtagagacagggtctcatcatgttggccaggctggtctcgaactcctgacctcaggtgatccacccacctcaaacccctgaagtgctgggattacaggcgtgagccaccacgcctggccattttttgttgttgttttttttgaggggggggcgtggtttgagtgtgtcttccacacttctcttttctcatcatttgctggctggttgcaggagacccagtgggagattccaagttcccacaggataacattttctggatccctggatcctctcacggaaggccaactgagcatcttgttggactgtgatgcaagttagcaataaaatttttactgcattttttaaatgggaaaaatcttaatagacatttttccaaagaagatataaaaagtggccaattagcacatcaaaatatactcaacatcattggctattaaggaaatgcagatcaaaaccatgagataccacttcacacatctattttgatggccagaataaaaaggcagataataacaagtgttggtgaagatgtggagaaattagaatcctcatgtactgctcatgggaatgttatatggtgcagccattttagttcatcagtaattaaacacagagttgtcatatgatagagaaatttcatttctgggtttacatacaaatgaattgaaaacatatgtctacctgaaaatgcgcatgttcatagaaccattatttgcaatagccaaaaatggaaacaactgaagtgtccatcagaagacaaatgaataaataaaatgtggtgtatccataccatgtgagataccatgtgagatactactagcccttctcagtgcatcatacgataaaaaggaattaaatgctgatacattcttaatcatggatgaaccttgaaaacattatgctaagtgaaaggagccagtaacaaggccacttattgtttgatctcatgtatatggaatgtccagaataggcaaatcttatagaggtagatagtagatgccttagggctggagtgtgaagcagaatgaggtgtgactactaatgggcacagagtttattttgggaggtgatgaaatgtttcaaaattaggctgtggtgatatttgcacaactctgtgaatataccaaaaaccattcaatcatactttagattggtgaagtatatggtatatgaattgtatcttgatgaagccattgaaaaaaaagtagtgctttgagcacggggggaaaaagagagctatttgttgggtgtgtgtactagtagataaagatcagcatggctagcattatggcacaaaggtgaatgtaggaaaataaatcttgtactttgaaataattaatattttaaggaggcaaaatatgtttgagtgatttgactttagaaactgcgaaagtcagctagatatgcagttccacaaaggtgtgtatattcttcaaccttgtttaagaacaaaaaatagaaataagcaaaatatccctcaataagggacttattaaataaagtataaattcatccaatgcagtattctacagctattttttaaatgaaatcaatctacatgggtttatatgaaaagatacccatgatatataaaccagtaagaaaaatactttatagcatgtagtttatacatacatgtatgcttgaaaattatgcattaaatttttcaataatgcacaactattaaataatggttacttctggggagtcagactgaaagatctcaaagaaaaaagaataacatactttttactttatattcttctttgtaggtgtagatcttgaatttctgtcaagtatacatgcaacttgctttccctccattcctccattaagataattttagacttatagagatgttttaaagaatttccagctgggcgcattggctcacacctgtaatcccagcattttgggaggcagaggcaggtggatcacctgaagtcaggagttggacatcagcctgaacaacgtggtgaaaccgtgtctctactaaaaatacaaaaattagctgagcatggtggcacacgactgtaatcccagatattcgggagactgaggccggagaactgcttgaacccaggaggcggaggttgcagtgagctgagattgcgccattgcactccaatctgggcgacaaaagcgaaactctgtctcaaaaaaaacaaaaatgaattttcatatatacttcacccaattctcccttttgctaatatcttacatgatcatgtaacatttatcaaaataaaggaattaatactggtacattactgttaactttaataacaatctcattcagattttacaattttaacattaatgcctattcttttctgggacccaacccaggatcccatattaaatttccttgtcatgtctcctaagtctttcttgtctttcatgacctcaacacttctaaagactactagtcagttattttgtggaatatcccccaatttggatttggctggtgttttctcatgattagattgaggtcatgcattattgacaaggattgggaagaggtgagcccttctcagtgcatcatactgggaaatacatgatattgatatgtattactggtgaggtttaccttgaccattttgctaaggtgaggtatgccagggttttttactgtaaatttgttatttttctctttgtaatgactatatattttggggagatactttaagactatgccaatatcctgtttctgcttacaaattttcccacaaattttgaaatccactgatggatcttgcctgcagcatatatcactgatttactagtgattttctttttttctcattccttctgccattattaatagaattctataaggaagagttgtcacttctccctcgtgtatttacttattcaattatttatttctatcagtttggacacatggatccttgttttattctgtgtgttataaccaatactgttattattctgttgctcacattgttccagctttggccattgggagctctttcatgttgtgtcctctgccctctcagtttactcttatctttttttgagaccatcaagatgctccagttcatcgggtattttctctgccccagccctggaatcaaccatttctccaggaggatcatgaaatttggatcaagatctttatatttactttcatattgaagaaactgtgtaaaacagagccaaaccctgtgaataaaattggtgaacatccctagcacaactgctttgaacttaaatagattccaagccccacattgattaggtcccagtgagtttcttctttagtgcaatcgatttttttcccaggtttatgagtcataataaataaaaaattgtatattttggagtatatgacatgatttgctatatgtattcattgtgaaacagttaccacaattaagtcaattaacacatccatcaccatcacctcacatagttaccattttgtgtgatgagaacacttatgatctactctcttagcaaatatcacgtgtacaatacagtattattaactacagtcaccatgctatacactgggtccacagaacttactcatcttacataactgaaagtttgttccctgtgaccaacatctcctttcccccaccccctggcaaccactgtacggctctgattctatgattttgacttttttggatttcacatctaagtgagatcatgcagtatttccctttttgtctctgtctcatttacttagcataatgttctccaggtttatccatgttgtcgcaaatgataggatctccttatttatggctaaatgatattccattgtggatatgcaccacgttttctttctccatgtatctgtcagcgagtacttaggttgtcttcatatcttagctgtagttaataatgctgaaatgaatatgcaagtgcaaatatagatacctcatttcctttgggtatatacccagaagtggaattgttggatcatatggtcattctatttttaattatttgaggaacctcctgctgcttttcataatggttgtaccaatacaattgattttaaaattcaagcaaagtctgtagcgagtaagcaaactcctcatcccccctgaccctaccacttttttccttatgaaaagccaggcctgactttgacataagacaaccaattttcgtgcttgtgttctaacttggctaggacctgagagttccaaaaatgttctgagagtgattctaaggacaatattgagttggagggctcccctcttttttaaaacaaaaacaaaacattccttcatttttaaactgaaggatcgaatgaaacactattgccttttcttacttctgaagaggaagatcgttctgtcccttcttatggaatatggtagaatattatttttaaggacttttaaaaaaattattaaaaaacttttatgttccttcgtctctctggcttataaaaagaaataggatgtgtttgcattgaaatctggcaatgattaattaactttctaagtgaagtttaaagaatacagaaaaaataacccatgcatattcagtagtaacgtgtgatagatttctaaaaaccagtgatcacagtttctttccccctctttccattctagtgaaaaagtttttacttcctgctgcatagagctaatataaaaacaccttttcctgaaatattttaaatttccttttacttatttgagaaatctttaattttctgtttgctcagatcttgattgtttttcattctgtttctccccttctgcctgttcatagttcccaataggaagaaaagaagtctcctatttggaattttctttgatttatccttgatttacatggcaaatagaaagcagctgtctatttaagcatctaattcttgaaaccatagtcccctcaagcgtcatctggaaataatgtagcttgtaaaacaaagctaagaagaaaaggcaatgtttgttttatgtgggatgaatgatttctgttggggtcctttaattcggctattatgagggttattaaaaagcagtattacaaaagaggcttaaatgaaaagaattttttaagctggtatcttattattacagttgattatagtcaaagctacaaatgttttataaatgccactttatttgagtttctctaaataagacccccaaaaccagtaattttattcattgtatgagtggaaattcaaccctttccttggttgatttaatttctgaaaacaaattgtattcgagaattcagctctgcttgtttttctggaaatttcacggatttctgacaaattcatgagaagaatccttaacaggagtatttgagaattaccttataaatgcagagaatgaacatgaaaagcatcagactttatctagacttaagatattattagaaaattcactgaacactagataaagttaagtcctaaattgtttcttaatttattcatgaattctttgagtttctgagatagaaatttggagatcttggtaatgggcagtggtatactttgggaagtaggaaggccagttgatttgtgctttgatggttgttggaggtcattccatgattggaatgtgttgattttcttgatttatttgttattacaacaaagcagttattcttggacagttgacatttcagaactaaacaatccttaaatatacttggaattacagaaatggaattacttggcacgtttgtttaataatcaacagggcagtcctgtttaattattttcacacatttgagtcacctgtaatctctcccctaatctcttctatgatcttaaatttgcatcatgcttgacatcatgaggaacattgttgctcagaaacatatcctttgtcctttaataggcagtgctagctaatcagtctggttgctgaatgaatgatccatcttctgtagggccatgttttaagcctgtgttagtcagctcaagatgccgtaacaaaatgtagactgggtggtttgaacaacagaaatctatttcctcacagtccttgaggcagaaagcccaagatggagtgtcagcacagttgggttctggtgaggcccctcttcttggcttccagacagccaccttctcaatgtgtgctcacatggccttttgttagcatctatgttagcagagagaccaagagcaagctctctggtgtcttttactataagggtactaatgtcatcagactaagctctgcccttatcacctaatctcctcccaaacaccccctctccaaatatcattacactggggggttaggccttcagcatatgaatttgagtgggaacacattcagtccataacaaagcctaaacagtactgagcctttaataatcagatatgatctctcttaagtttcatactagttaatgaattccagttagactaacttttgttccattagtagtagtgctttaaacctctatgtgaagtaactcattaaccaattccaagtcctaaatttcccatacccattatgaatgcgctataagttataaacattctccaggttaccagttttaaatagcaattgtgaaagactaatgcaagtataaaaacactttgtgaggctgggtgtggtggctcatgcctgtaatcccagcactttgggagaccaaggcaggcagatcacgaagtcaagagatcgagaccatcctggccaacacggtgaaaccccgtctctactaaaaaaatacaaaaattagctaggcatggtggtgcgcgcctgtagtcccagctactcgggaggctgaggcaggagaatcgcttgaacccaggaggtggaggttgcagtgagccgagattgtgccactggactctagcctggtgacagagcgagattccatctcaaaaaaaaaaaaaaaaaaaaaaaacactttgtaatggtgcttgaaatttcttactctttcatccaacaaatatttagtgagcagcttctatgttctgggcactgtcctctgcccagtgacaataaaaaatctctgctctcatgaagcctctgttctaatgtaaggagggatatataataatttcatacataggtgaatgaatgaaaaaattaataaaatgttagaagataacaagttccatgggaaaataaagcaggatgaagagattgggagtgttgggaattggaaggtagcagtgcatatgggtgatcagtggagcatatatctcatttagaaggtgatagttgagcaaagacctaaagcaggagagggaatgagctttgtagatatctaagggaagtgtgttctcatggaccagtatggtccatgggctgttggaactgagccacacagcaggaggtgagcggcgggcaagtgagcaaagcttcatctgtgttggcagcttctccccgtcactccattacctcctgagctccaccacctgccagatcagcagcagcattagattctcataggagcgccaaccctattgtgaactgtacacgcaaaggatctaggttacacatgccttatgagaatctaatacctgatgatctgtcacagtctcccgtcacccgcagataggtctgtctagttgcagaataacaagctcagggctcccactgattctacatcatggtaagttgtataattatttcattaaatattacaatgtaataataatagaaataaagtgcacaataaatgtaatgtgcttgagtcatcccaaaagcaccaccctgcatccgtggaaaaatcgtcttccatgaaacggtccctggtgctactctaataaaatagagcagggagtgcaaaggctttgaggcaggagcctcacagacccctaacaaggtaatggggctggaaaggagtttatctgaatcttgtttataatcatcttaaacaaatgctaattgaggaatgatccagaaaagttttggatagagtgacagactgagaattagaagacctgagttctgtttttaagctaactttaatttactatgagcttgggcaacttattttgccattttgacccttgattttcttgtatttaacatgtatcttaaaggcttggtgccggggcttgcacctgtaatctagcaatttgggaggctgaggcaggagaatatcttgagcctgggagttcgagaccagcctgagcaatatagggagaccctgtgtctacaaaaaattaattaatttaaaaaatgttaaatatatttttaaaatgtatcttaaagtacattttctattttctttttttttttgttctttttttaaaattatactttaagttttaggctacatgtgcacaacatgcaggtttgttacatatgtatacatgtgccatgttggtgtgctgcacccattaactcttcatttaacattaggtatatccctaatgctgtccctcccctctcctcccacccaacaacaggccccggtgtgtgatgttccccttcctgtgtccatgtgttctcattgttcaattcccacctgtgagtgagaacatgcggtgtttggttttttgtccttgcgatagtttgctgagaatgatggtttccagcttcatccatgtccctacaaaagacatgaactcatccttttttatggctgcagagtattccatggtgtatatgtgccacattttcttaatccggtctatcattgttggacatttggcttggttccaagtctttgctatcgtgaatagtgccgcaataaacatacacgtgcatgtgtctttatagcagcatgttttatactcctttgggtatatacccagtaatgggatggccgggtcaaatggtatttgtagttctagatccctgaggaatcgccacactgacttccacaatggttgaactagtttacagtcccaccaacagtgtaaaagtgttcctatttctccacatcctctccagcacctgttgtttcctgactttttaatgattgccattctaactggtgtgagatggtatctcattgtggttttgatttgcatttctctgatggccagtgatgatgagcattttttcatgtgtcttttggctgcataaatgtcttcttttgagaagtgtctgttcatatccttcgcccactttttcatggggatgtttttttcttgtaaatttgtttgagttctttgtagattctgtatattagccctttgtcagatgagtagactgcaaaaattttctcccattctctaggttgcctgttcactctgatggtagtttcttttgctgtgcagaagctctttagtttaattacatcccatttgtcaattttggcttttgttgccattgcttttggtgttttagacatgaagtccttgcccatgcctatgtcctgaatggtattgcctaggttttcttctagggtttttatggttttaggtctaacatctaagtctttaatccatcttgaattaatttttgtgtaaggtgtaaggaagagatccagtttcagctttctacatatggctagccagttttcccagcaccatttattaaatagggaatcctttccccatttcttgtttttgtcaggtttgtcaaagatcagatagttgtagatatgcggcattatttctgagggctctgttctgttccattggtctatgtctctgttttggtaccagtaccatgctgttttggttactgtagccttgtagtgtagtttgaagtcaggtagggtgatgcctccagctttgttcttttggcttaggattgacttggcgatgcgggctcttttttggttccatatgaactttaaagtagttttttccaattctgtgaagaaggtcattggtagcttgatggggatggcattgaatctataaattaccttgggcagtatggccattatcacaatattgattcttcctacccatgatcatagaatgttcttccatttgtttgtatcctcttttatttcattgagcagtggtttgcagttctccttgaagaggtccttcacgtcccttgtaagttggattcctagatattttattctctttgaagcaattgtgaatgggagttcactcatgatttggctctctgtttgtctgttattggtgtataagaatgcttgtgatttttgcacattgattttgtaacctgagactttgctgaagttgcctatcagtttaaggagattttgtgctgagacaatggggttttctagatatacaatcatgtcatctgcaaacagggacaatttgacttcctcttttccgaattgaataccctttatttccttctcctgcctaattgccctggccagaacttccaacactgtgttgaataggagtggtgagagaaggcatccctgtcttgtggcagttttcaaagggaatgcttccagtttttgcccattcagtatgatatcagctgtgggtttgtcataaatagctttctattttctaatgtggttttttgtgtgtgtggttgtttttagcttcagcattctctcatttcatcatttccttgaggttaccctggatataaagaaagggatttaggatattacttcaagtcagatgctgggagagaaggaggaggaagaaaaggaggcaattagctaatttgaatattacatatggtagggaatcaatagaaaatgacaattaaactaaggggactagggagttatataaagttattcatgtaaagggaactattagaacaaatatataaaccttcctaaataccaaaaaaaaaggtaaaaactaaaatataaaaagaaaacaagtaaaatagaccacatattgaaagactacttgcataaaagacttgaatacatagacatatatataaggacattaaaaacaaacagataaatcttctacctacagctccatcagtaagaatttgttgaataagctttggtacattcacacaagaaagtattataccatgcagctataaaaatgaatgaaaacatctccatatgaagctctatatgccaccacataggcatcctcgggacaggttgatactcatttgtatctgtttatattttggaaacaaataggggaaggacaaactatagaaaaaattgttaaacagttacctataaagaaagtgaagaaattgggtaaaagtgaaagaggaatgaaactcgacttctttgaatattttttgttctttgatgtaacttaagaactccataaatgttttacatgattatgaaacaaaagtttaaaggagcagtgtctaaaatttaaataaattgaaatcagtgaacctaaatatatatccatttggtggcataactgaacatctaagtgactattcctagtaggctataccttaaagacacaattgaaaaaatagtttttactaatgacatttgtatagaaacctttatattgttacttcaagacgggtgtaatgtgagtttaataaaacacattagtaattgtgaaatattctaattttgttttcccattggggacctatatttgtatattatatatataaattatatatatatatatatatatatatatgaatttttttgagacgggatcttgcactgttgcccaggctggagctcagtgtgtgatcatagttcactgcagccttgaacccctgagctcaagcaatactcccgcctcagcctttcgagtagctgggactataggcacgcatcaccacgctcaactaagttttttattttttgtaaatgcagcagggtcccactgtgttgcccaggctggtctgaaactcgtgccctcaagcagtcctcctgctctagcctcccaaaatgctgagattacaggaatgagccctgatgtgcctggcccaggaacctaggttttgacatggaaacattatatgcagatttaaaatagaagagattaactaagaaccctttgatcttgaatttgaataggaagtacctgcatggacttatgcttttgttgttttaatatttatagttatgtctagtcattctacttctgtcctttgaactcattgtaacagtgaccaacccaataacagctttgagcatctgtaacaaccagatttctactaaaaggaactggggatttgtcctgcctttcaaataagatagtaacactagatgtcaaaatagtagatatggagaagttccactttagagaaatattcataattgaaaaagaaatgatagaattagaatatcactattttgcaaaccctaattagtagattcgagcattgagcattagtgactgcaaacttacgtaaagagggaaccatatattatgtttctcctgatgtagaacacaccaccatctatgaagtagtcttgcaaaaaaaaaacccaaaaactaatcagaccaagcctctaaatttagctaccaattttctggggaaacccagaacagagaaaaattaaacatcaccaaaatccaggatgcaagaatctatataggacaaataacctggtttcttcaactaacaaattgcaataagaaaggagagagagaaaaacacattaatgaagaccaattacaccatagagattttatttgaattctcattctgcctgtaagaaactttttttaaaacctaattagaaagttgagcactggctggatatgtggtaattttcagggattactattaattttttatgtgtgaaaattgcattgtgtatattttttaaagaatctttatattttagagatacttaaccaatatatttatggttgaaagatttgtttggactttgcttcagaataaccctggagaagaggaaatgaatgagtataaggaaacaagattagccatgagttgatgggctgggtgataggtacatggaggttcattatactatcctgtctgtctttgtatatatttgaaatttctcgataaagaaagttacagaggttatacagcgtatgaatatgcttggcgtcactgaactgtatactcaacagtggttacaatggtaaattttatgtttatttcaccacaatttttttaagttaaataatatgagtattggaatcagaaagaactatatttaacctttatgtgaccttgaccttacttaacctctctgatatttggttttctcaacagttaaataagaccaatatccggcttgccaaattttatgagaattaaattaaatactgcatcgaaagtacttagcaaaatatttggcatataacaagtactgtgtaaatattagtgaccttaattactaccactacagcttctaccacctgaaagataggaagatatgccctttattctcttatcacctaaaaccaaagcttattactgaggaaggctgtttaaaattctcttttcattgcactgtggcataaaggaataaacttacactgcaagtcagacagacttcactccccattttaggatttactagctatgctgtgttggttagtagttaccttagagaagttactgtgctctcatgtataaagtgagaatactagtatctactttccagaattggattgaatattaataattatatgtgtaatgttcttggcataatgccatgatcatagtaggttttcagtaaatgataggtatgatcatatgattgtattcaaatatgattatcattgttcaggaatggaaagtaagaaaaggtcttttccatatattcttcctgaacgaaattgatctgaacatcagaacaatctttctgatttaattacgggctttagaatatattattaaatggtatctattttctcaattttaaacatttataactttatttaactggggttttatcaatagcaccttatcatctttcctattagggggatgataagttgctactgtgttggtgattgcagcagattaaaaataactggtaagtgatgcccagggttaacctattctttggtaagtaacttgaaaattttataccaaaaaggacttgttgtttaccagatgcaaatagataaagtactctgcctttccctttctctactggagattcaagtccaacagagatgaagtctgcatctaacagaaatgtttttaaaacagactctggaaattttttgtctggaaagagacaaaaaaagaattgattgtagaaaatctgtattctcaatacatgagtaatgtaataacatgcatcctctttttcagaatgaaagcaaacccttcaaattctcatttcttaagtcattggtaaatcacttcatatgtccaagcttcagtttccccacccaagagcaaagactctagattagaaatatctggatttgaatcctagttctgtctcttaatagccatgtgacagtgaggaagttacttaatccttttgagtttcaattctacatctgaaaataaacacaacactgtaattaatttgctataattaattatcttttaaatagagtagatatagtagatgcagaagcaaaatatggaataaatacaaggaaaacatcatccataaatatgtttaaaacatattggccaggcgcggtggctcacacctgtaatcccagcactttgggagaccgaggtgggcggatcacaaggtcaggagatcgagaccatcctggcaaacatggtgaaacccctgtctactaaagatacaaaaaaaaaaaaaaattagccgggcgtggtggtgggcgcctgtagtcccagctactcaggaggctgaggcaggagaatggcatgaacccggggggcagagcttgcagtgagcggagattgcgccactgcactccagcctgagtgacagagtgagactccatctcaacaaaaaaaagaaaacatacttattgattttattcatgtcatattttgtcccagacattgagtccatagcgatgaataggcagtcatggaccttgcctcaagaagctagtggagggaaaataaacatcatttagcaattaaaaatggagctaaaataacagggacataatgcaagagaatcgcaagaatcctgttttagatttagaggcttaggattcaggggtttgctctctgagaaagtgatatttaactgagacctgatgatgaataagagttgccagagaaaaaatgaggatagagtgtttttaacagcatgtgtgaaggcctgaagcaggacggagctctgtttattcaagaaactgttagcaggccagtatagtttggagtgtggatagtgggggagagtagcattaaatgagtatgaaggaataggtcattgtagggctatgttcaaggcctgatgagcccatttacggtaaagagtttggaggttagccatagttcagcataaagtcattgaaggattttgggcactagagtaacctggcctgatgtacctttgaaaaaagcactgtggagaagtgacttaaagggctaagtgttgaggctgggagtccagttgtcaacatgctgagagattacagtggcttggaactcaagaggaaaaggctaggctgcagatggaaacataggtgacatcagcataaataaaatgttcggagtcatggcaattgatgaatgaacaatgggaaggaaagagggataatccagagctctgagagacctccaaccttcagaagctgggtggaagagaaaatgctaacaaaaggaatcagaaaaaccacaagagcgtggtgtcaggtaggtatgtcttaaagtggaagaaatagtgaacaactatacatggaagattgagggtaagatgaggattaaaacacatacattggatttggcaaaacagaggtggtgtctgggcatggaaaagtggggattattttgaatagtataaactgacaagtagctagattaattaatcatgagaggattctcttagggaataggttttttagttgaagtctaagaaagggcatgaaatttattattctcattctcctatttagcctgtcttatcttaggatatgtccatacccctgttcctgttttttagccaacccaactttatgaagttcttgtggagtctaatgataatagataaacttgtttaaaatacaagttttatatcactacattaattaataacagctcataataaaccttatagttgctaaatgtcttgactttttaaaattcgtatcagattttaaattaagttatgcttaataaaccaagtgaaaaatactaaagtcaaagtgtattactatatcttaggttataggaagctccaaatggcctcatcataacactggaattatttccatgagattgcaggatgtatttaagtatctcttacattatataataagccttgcagtgatcagcccatttcaaggaaatactccttgcaagtatgtataaatgtgtttctgctttacaaatgtttgtcattttcctatcaaaaactatagaggaagaggttttgagaactgagtacaaatgaggaaaatgaatgctatgtggcaaaggatgacaactgtgtgtgtgtatgtgtgtgtgtgtcttctgaaaaagctttagactttttttctttttaatgttttatcctagcctttttactattatgttacttatgtagagccctctgtccattgagttcaaagcacttagaatcatcaagtcatttattttttgaatttattgaatgggtgcccattgttcaaaagcctgtgggcgtaagtacagagttataaaagcacgcaaattaaatgtaatggcacaggagtaagagagaaagccagcaggattaccgctgtgcctattgggaatgccacactcttaaaaagaaagaaaagaagagaagcaaaagagaataagaaaaggaaaaaaccaacaacctaggattcatcgtgttctgagagttaaaaaacaaatttgtcagtcaaagggaatgaccatggggtgcagttaagagagtcctaattggatttgcagggcactctgaaaatgctccagcactcacagacccagattttcctctaaaaactaagcctgataaactattgttctgttttcttcattttaatgatagacattcagatataaggggatttgcttaactgccattgtctcaaagcagtatcgtaaatttgaagcatgatcttattctcagattcccagttaattcttggttttgtttctttcagtcatttattttagaggaatatccattacattttagttgtctccctcaaacagtagttttaaaaatggatattttcacagtttagcatatcagtaaaacttagtaagctccttctaaaattaatttagaagagggaatgcctcgttttttaagagtaagaagtcaatagataattgaaaattataaaatttaaaataatagtacacattatttcagaataagaaagcaaatgttggaggaaatagaaaaaatggttcaaagtatttgcctctaggtcatggatttggggaagggaaaggatggatcagagggctgctctttttctgttttaagtctagtaatcttgaatttcaactgctctcttatcactctgataaaaattaaaattacaacaaaagtttaggaaaaagaaaaatgagaacaggaaagctattcctcatgtacaataaatttttgaaatcgttttcaaaactgagcttaatatattattttctaagtattagtctgtacagttaataggttcatcagcaccctccctctctaaagcatagtctaactctcggagagattggctataactgctaataaattatgcattccacaattaggccttttctcctatttctggtattactcctcatttaattggaatttctaatgacgcttgactgaaactcttgaaagtattataacatgaagacttaaatcggacacttcctgtacttctgtattcaggtctcagtctaaatcgtattaatacttacctatcctcccttttctctgctttcatagcatttttcacaattttcagttctcccctactggactctaaattccagttagtacagtacctgttcataatgccactgtttagtatttgttaaataaatgacacatttcatctgggaatattgtggtgtataactgatagctattgggagaactgattaaattgcatcaattagcctgttaatctgaagacgttaataaaacctccccacctgcctagattacattgaaccaaacctaccaaaaccagtaaattacagtgaaacagagactgctgggcaggtattaagtatccatgttatcaaggcccctaggaggtggagggaatattccgatagcaactgttctgggatcttttgtaaaaggcaatttgcaactgtggttttttgtgtgtgcagttaatgcctttttaatttctccctctgtgtctttgcctttcagttttcttattcttgttgttcagcatgtctgattcctcatccaatttactcaaaatttaattgacataaagctgaagccatttagaaggttataatcattcttttatttgtcttgttgacataccaaagggttagagttagcagtgactattgaataataaccagtaaattagttcagatcatggcacggcatgtttcttatatataaatcacatacataaaaaaagaaaaaccccttcctaaacattttgcttgatgaggcaattttattaagaaggcaattagattacacacattggttttatactaccattttcctattctttgggcatagagatttcttgttcacctaactcccagtgtaaaaccaaggggtttttagaactattttaactgatcattggctttattgatgaaatgtggcagagattttctagttgcttctgtgcacatttaggcgcttcccaaggttaaatgagttgtgttcactacaaaacactttctgttgctccctatctctgtgattggtgctaaggtggtgtgtacagtctgtcccactggaactggtgcctgtctcatgacatctctgactttggatcttagggaaagtatggtttgcttttaactaaagaaaaactatctgttatttataaacttagaggacagctgaccaaagagaattatggccaccctttatccaatgctaaattatctacccttattgttctttcttaatattcctactaaattaggggatggcagggtttctagagtcaaaggcaaaaattcagtcttaatcaacatggttgattatacatttctgtagcatttacagttaacaagtcattttcaaattagttctcataaaggcaggcaagcattatatttctacttaacaaaagaaaagaaattctcagattaaatgagttgctcaaactctgaggtgattatttagcagagtcaggtctagaactgaggtcttttgactccctgccagtattctttccatgtcaccaggacaggactgagaaagtgttctgttactacttgccaagtgtgaggcctgtactgagtgtgttatttaactcattcagttctcatggcaccaccatgatgaagtaggtcggtgcaggaaggaaatgtctacttgtcacgttggtcatagcagaagatatgctgtggtggtcagttcagtgtgttctggtgataggattgtcctatgcaaatgttacaaggtccacacattgtagaatcagctgcatcttcattctgtactgtcactatactttgataagaaatgctaccaagtaaattttagctttgttgccattgatactagtatgagtactcaatgttttcttgttatagtgtattcattaccataaaatgtcttttacttgcattctgtgtcttcctcttaacaaaatcttttccttatacccaaaccattatgagtggattaaagaaatgcaatagaagaaaggagggagttgggtagggatcacattccttcttgccaagtaaactttgactgagaacaccctttaatagcattttcctgcatttctacattaatatcaacttttctttgcctcaaaagaagaggatttccttcatgcctgattaagagtatttttatttctggttttatattttacatattgagagttgtttctacacacttcttcccaagaagactctcaggaaaataaaattaagcatttgtctcttccaaagaaattgacaccatatagcaaaatgacaggcagctcccaactcatggtgtaattgattgctagaatacgattcccaagtggagccgttttaagtcagacccttataaatattatacatattaagtcctatccccccagactaaattcattataaaaacacaaaaataggttacaacaaatgaaaagtttgtgttttaaaaccatgtaatcataaaagtagctaaaaattgggatatatatataacatatatgtatgcttttgggttcctttggggctttgaaaatgtaagtccagtgctatttggactgaagacatcttgttatagtaacacttgctgtagtaaggattcttcattacactctaaggactttcaaactgtttttaaaattagtttctgccacaggaaataaattgcaaatttaatacaggattgcctcctaaagttcttgaatggcagtggctgggccacagggagtttccatggcaacctcagtgatcccttgctctaattgtaccagcagactgagttagcttcactgctgttgaccttgactgactcatgagcattagcagttgtttggacaaaatgtaggcattgatgccattcattagacaaccataaatacaacttttggtcatgattgtgaactatagttataatgcagtgaggtttcaaagcaggctgtctccagtcagggttacctgtatttcagcactagacttaaaatattttttaaacatatacataatattttctcaggagattaaccagagtttagtataacaatagcatttaggttcttaaagatctcagattcacagcttagagcatttcattgtaatgtacttaaatgttctaaaattcaaatttcagcctgttggaaacacttctctgtaagaagacattaaagtacaagtcagaaaacgttagtttctcttagtgcctgatagccttcttatacctcctaaatacatctgtacctaataagaaacatttgttattaccattgcttttactagtaagagcaacaatttcttgagctgctcctctgtattaggcattgggataggtgttttgcatgttcattgtctcatttccactcttctgtaatagttttgttgataatgaaatcaaggttcagaccctcgcccacggtcatataagcagtaaatagtagaacaaggattcaaaggcaagtcataaggagcctggcctgttaactcttgtgccacagtgtttcctcttgtatatctggccaatttttcatacaactggggagtctttaatacacagagtagtagctcctgatttgaatctatgacagtagttttttgtgtcttcagtaaagttcagcattcttcaattgtatttgcagtattatttccaagtggaaatagtcattttttctcttttttaaaatgttgtttatttacgtatctggagagaagtggtttttttatgttttgtttttttccgagatggagttttgctcttgttgcccaggctggatcgcagtgacacgatatcagctcactgcaacctccgcctcccggattcaagtgattctcctgcctcagcctcccgagtagctgggattacaggtgtctgccaccacgcccagctaatttgttgtatttttagtagagatggggtttcaccatgttgaccaggctggtctcgaactcctgaccttaggtgatccaccgcctcagcctcccaaagtcctggaattactggcgtgagccaccatgcccggctgagaaaagtgtttttgatagatttctgccgtacaaaactagacaagattttataactccaaggtgaaataaatgacaaggactacatcttattttatgtccttggtatctattctcagtgcttaagacaatgctacatgtcatgatgttggcactcagctaatgtttgtgaaatcatcgtggttattttctattcattttattgtttgtctgtttcaataaactgaggatctgttttgtcaaattttgttaaactgtgaggtagattcacttatttccatgtagaaataattaaatcaagacagcattcgttttatgtattaattattctagagggaactttccttttgaaaataaaaattcctcaagcatattatttggcttttcactaacagttcaaaaaatgcatcctgtactattgcttttctattttaatttgctaattacttgaaaaataaagtgaggtgatatttaatgctgtttgaaacgtaatctccttataaaccattatgcaaaagcttactcctgctgcttcgctagaaatatcttcataaatgtctagattttcacccagtgaagttggatcattggggctaattggtttttttctccaacattttattattaaaattttcaaatatacaaaaaagttgaaaaatgttgcagtaaatgcccatatacctaccacccagattcttcagtaaattaacactttactggacttgctttattaccctctatttatctctctgttcttctatcaatcaatcaatccatcctgttttatgcatttcaaagttagttacatgatatctcattttaatagcttcatggtattgctttgtccagatgtactataatttagtcaatcatctactatcggacatttggaattgtggtaggtataataatagcccctgaaaagtgtccacatcctatccccagaacctgtaggtatgttaagttacatagcaaaaaggactttgcagatataactaaggttatggaccttaaaagagggacattagactggttattccagatgggtctaacctaaacacacaggccctcaaaagcagagaactttttgtccagccaaagcaggagagatgtaccagatggagatctcagagagcttcaaagctgagtggcatttgacttgccattgctggtttgaagatgaaggaggcaatgtgatggggaatgcaggcacagactccaagcttataccagcaggagaatagctctgcagctacaaggaaatgaatgcctctaacctgaatgaactcagaagagattctctccctgagctcccagaaaagaaccctgctcagctgacaccttgcttttggcctcattagatgcggaggaaccaaacctatctgaatgtctgcagaactgtgagacgacaaattttgtgttgttttaagcggctaaatttgtggtagtttgttatgacagtaacagaaaacaaattcagggatgatgaaaattttgaaaattttttgttattgtgcaatagacatccacaaagtaaatccgtgggcatggtcttatttccttaggataaatttctaatattagaattgtagggacaaagagtcttcacattttttaagactcttaagtacgtatttataaatgggtccctggaaaagtagtttcagattatactttcatcagtgctctgttgagaatgccatctcctttcttcttgacaacacagaattataatcatttgttatttttataacaaaaacaaatggcaaagaatgtatagcattataatttaacagacattgtttaactaccagcaaagttgaacatattttaatattttatctttggtaaattgtgtgtttgtgtctattgtacattattcttgcgagttgtttgtcaggaagcccctttctcctactttactaaaacaattttttatatgagaagtgcctattgacttttccctaattccttttcaaaatctattaagatgatcatgacttttttctcctttgaatatttactatgagtacatcaatagatttcctagaattgtactcttccagaattcttgaaattacttggattgtaacccttttagcacaatgttgaatttaatgttcatatgtttgagtattttaatgacggtttttgtttttatttttatttttcaactaactttaccaatttttgaaattatagttatgttacccctgtttaaggaagaacaaaatgagaaacgttctttttctctgatttagaaagcttaaatggcatagtaattatatattccttgaagatataaaggagtttactcataaaaccatatgaacccaacctccttttttaacagtgtgtctctgacagatttttcccttttttcatggttattctcttcacattttttatttgatcttaggtcaagttgaggaatttatagtttcctacacaatttttcctttatttaagttgtcaatgtaaaaaattttattatgaaaaagttcaaacatacacaaaagtagtttaatgaacccccatatctcattaccttgtttctgcaattagattttgtcatatatcctttatctgagctttttatttttcttgtgctgaagtatctttaaataaatcttgagattttactcctttatattttggtatgcatctctaaaaataataacattttctttcataatcacatatcattatcacatctaacaaaattagaaatatttcctaggtataatctaatgcacagcatattaacatttctccggaagtctcaaaaatggctgttggcaatgtgttaaaatcagaatccaaataaaattcacacatttggttgttgtgtctcctgtctcttttaatctagagcaatcctgtctttcttttttctcccatccaattatacggcagaaattgaaccatttgtcctgtagaatctttcacattctggtatgtccttttgtttccttttggtgtcatttaccttgttctctgtccctcatatttactataattaaagttagctctaaagtcttaaatagattcagattctcctttcttgttaagaatactgcatagctgggtactatttggttcacaaatgagaaggtatgattgtctcactttagtgatggttaagtgttatatactaaactgttttctccaaattaatatgttgaagccctaacccccaataagactgtgtttggagacaggacctttaatgaagtaattaaggttacacaaagatgtgccccttatccagtaggggtggtgctcttataagaagaggcagagactgggcgtggtggcttaggcctgtaatcctagcactttgggaggccaaagcgagtggattgcctgagctcaggagttcaagaccagcctggctaacatggcaaaaccctgtcactactaaacatacaaaaacattaaaaaaaatcagtcaggcgtggtggagcaagactgtgcctcaaaaaacaaagaagaggcagagacaccagagctcacttgctcgcttgcttgctgcttacagaaggccctgtgaggacacagggagaaggtggcatctgcaaggcaggaagattgaaatgtcctccatgtctgtagtcacattctctttgtcaccttaaagttggatatttgtgtttttcctccttttttcttccttcttgtttcgggttagcattttgtctgttgtttgtggtaagtattataataaccaccaagtaaggaacactctttatctgctacgcaagaccataaatagttttaaatacgttatttaatcctcacatcctctaaagtaagtagttctctcatttttctcacgggaaagctgaggctcaaaaaggttcagtgaattgcccaagggcacacagctaacatatggtaaagctgggattcaaggctgactccagggcctatgttcctactatttgtctatgtcctcctccccacaaaacccccaaccctattccaagtgctcccatagcgccttgtactttcacagggtgcctctcccctaaatggtaacctgtgtgagggcaggaacatgtctggatccccactccaacccagcatctgccatagcacctaccaagtcatacagtccattgtataattctaggaaatctattgatgtactcatagtaaatattcaaaggagaaaaaagtcatgatcatcttaatagatttgaaaaggaattagggaaaagccaataggcacttctcatataaaaaaaaaattgttttagtaaagtaggagaaaggggcttcctgacaaacaactcaaaagaataatgcacaatagacacaaacagacaatttaccaaagataaaatatggacttatggactcaggtgtctcattttctactgaatgccggacattgtgctaggacattcgaatccgaggttaaaagcatttatgcctgtaaatggggagacctttgcttttagactattaatgggagttggttccttcttgagcagagttgggttttgtgtcttcagtgcaccaccagcttcagattcccctagcagctctttattttatgcttaaagggtggagtctgcagtgtcagagggcttttttcagtgtttctttactactccgttttcagcagtcccagcagtagggctggagaagagacctctctgttgtcctagtccagcctcaatcctggagagtccctgtgtgcacctggatctcagaagtagacctttctctgcattcctgtcccttctccagtggtagcagacctgtgcttgatattggtatgcgtataggatcctgaacccaacttggtttcctgcctcaaatcccagaactagaaagttttttgcttttattcctctatcatcaggattggatctttatctatgtcctggaggtgagagagcttcctacctcttgttcaggggcagacatgtttctaccatccccctagagacaatgaaaatttgcctgtgctacaggccaagagggtttgctgccctgtagcttacggctttttcttagcatgagagaagagtcagggaagaaaatgagtcttggagcctgcccccagcagcagttatcacctcctgcaagcttgagcagtggtagaggggccctcttcagtcgcctgctccataccagcctttctcatgagcacctagtagaggatagtgagaaagaactcttaagtgaacataaaatctcttgcatctgggtttcaggtttcaagactgacacattagcctttaataattcatcaacattttagctgctttcttctttgccacttctgtggacaccacttcttccttgcatgctcagccaaaggtgaatgtttgtgttccttctttccttagaagaggtacttgaccctctttggaattcatttatctggttgccttgtgaaatcatattctgatgaacttaagaagatttaagatttattaagttacctggtttttttctcctcactaaggagggtcgttctttgttactttgcacatcctacacggaaactgaagtccaggttccttacaatgtgtacacacgtgacctagagagcctatttatcctacatttgaaggaaatgaggcctgtgaaagtgacgtgccctgtccatggcaaaactgggactagaacccaatctggagcttctctccatggacttggagctactctgtttttctttttttttttttttaacttgagcttattacacccctatttgtgaccctttactgccttttttggcatcactgactcttcttcccaagaaagaatgaaaaaagggcatcaagcgtcataggtctctgaagtcaatgtgtaatccatgacacacaggtttacagattatttcccttctgtttattaagagtatcaaagataaatagcatatattgaaaacagaagaatcaataggttccttgggttggagaatgattattttgaaacttaactttgtgcatttttacttataaaggtttttggattttcttcttcttctaaaaaccaataatgactctattcatggtggcagggtaatctaaattctgaattttcctgaagtttgaagttaccctgaatacgtttctattttaattacattttttggttatattaataaaatttactttccaaattcagtattgtctaaatactttatgaagctgagacttgagactaggaaggggttttaaaaaattatgtaagtacttatttttgcaaataaaaactgtaactcaggtgatgtagcaaaggtcacagctaattattggcagtgctgggactcctggatctcagatttgggatgagacaaggcactcagtagaaagtcaaagactttttttaaaaaagacacatcttcctaaagtattgctttacttagattttacttttcgtaggctgtggaaagggatttctttttctaataaaacaccaatatagtctaagaagaataaaaatgaacactaatacttaaggtaaaacattgaacttttaaaaacagaacaccaagctctggtacgcacttgtctcttctgctggcagtgggcctgaggaagggtgagaaactctattctgcaccccaagttctgtccactgcaagtggcctgctaacataatctgattgtcagaggctgcacctttgctggatttcaatcagaacactctttgtatgagttctctggctcttctccggatgtggaaaaacgtggctttagccagtgtaccctagcagccacagttctcttgtcactgcctccagtgcctttgcagtagtgtatgttaaagaacgactttccagagtgttgtggttgaggcttgtgggtcacattcaaaccacatccaaggagtgtagaaaaagaccacatggttttacatccccgcatgagaccagtggtgcggtgactgctgtctgctcaccgcctccccctcccactgctttattaaggttacccattgtctttttaggtcacaggatttattcttcagctctgattttatgtgtaatataaaacctgttctttctatcagaagctcagtattttggacaaatccagttctggctagaaataacatggccacaaagctttccagtgtgtgcaccagtgaattagcaacgtaaagataacaagagtctgtcaccaagtgattgcctttgaaggccattggcgcattaactttaaagagaactttgcttgtgcatttcctccccctactccccacttttggcaaaatcccattaattttgttgaaggttttattttctgctgaaaatgcaggaaatttagacaactctcttggaatccccccaaaactaatacaaacaagatacatatgcttctcttaaggaaactaaaaataaagatttgaaactatttaactgtataaattccctcttaaaaggaaaaggaagtttatagaatgagaggcaactctgactgctgttaacaaggtaaaatattcccacaatggccaacttctctatttgatatgaaattactacttcgcatagaatttgttgagctttcattcccaacatatttgatgtatcagaaacatctgaaaatgggatcattttcttgtttttacgtttgaaattgtctgcagtaaaataagtatgcccattttttggaggagaaagcctgtctgatatgagatctgttcctgttacagaagctgtaaggactaagaggaaaataccatggctgctccattgatgagctagcagattctattatggctgctccattgaggagccagcagattctacctctgacaaagctaattttgacacaatactgaggaaatacggttagttttcaaaagcgtgtcttccataaaatcttatttcataaatgcaagtcagtttttctatacattgactacttttataaattaataagagtgggattttggacttacatttaaaactaagaaacatgagttctgagttctttgcacttatagtaatttcaactttggaaagccatttatattttttatgataatgtctaaagctaaaatgatttttctccttcaaaatacttcgaaaatatgtttgtggatgttttggataacactcacatagtgcttaccatgtgttacacacagttttaaggactttacaaatgctgcctcatttaaaatttatgaaaaaaaaatcaaataatattaaataccatttgaaattctgacacccaaatcatgagattagataacattttaggtctgtttaagtactgaaatttggatggttttgtaattttaaagaaactctccaaattcatgatttttcttctttttacaagtggtgattataacccaataatgcttttaaaaaatgaaacataaagaatttcatttattaccaaggatgtctgaaccagacatctaatcatagtagcaagttgaagattcaagtaactgggaaattatagttgttgagatagttttccttagaaattagaattagtcaaaaatttgatactttgtttttagtaaatcagaatctcagggtacataatttacccctctggctcctgattatttcatgatctgcttggtgccttgaagctgtagttgatcttccaacaccaatgggaggatccagagcatggtttccaggaaacgacttacacggtaggaattctggctgttccctaaaggataattaaagtagtggttagcagagaactgttgtcacttaaaaatggaaatgaattagttgcaaggattacaaatgtataaatacttatgtatcttaatggagataatggaatacacagcattacatctatgatcaaaacaatccaaatgctagacatctagcaaagtgcaaataaaatgatgagaaggctttaagccaggttgtattgagggacacttgaggttgctgatgggcttgagaagaagatgatagctataacagtggaatagactgaagactggcgagtaggagtagggcgacagacttctgccaaactgcaacagctttctgtactgcatagaaagaatgaggagcctttcaaaagtgttctgtattcaaggatgggctggttgaccacatgggatgaatgttatagaagggattctagcattaaggggagtcactttagtgtcttttgtatcttctgagggtgttttataattttacgattctttgaccaaattctaagctttctaattggatagatagtaactgaattagtagtaaattaaagaattgctgaattgaataaagtaatgcacgtagaaattcttggtatagtttttggactataataaaaccaattaacgtagacctgacttcaaggaaacttcattttatttttctttcttgaaagagagtatttatgtcactactaccactgacatccagccaatgcaagctagtagggctgccctggttgtgctcaacctgcatctactaggactagcagtgccaactagttgttaaatatttggaatttcacgcctgggtataaccagaaaggaaactattctttctgtatagggattctttatattgaaattttaataactttatttatttatttacctttgagacagagtctcactctgtcacccaggctggagtgcagtaggcaatctcggctcactgcaacctccgcctgctgggttcaagtgattctcctgcctcagcctcctgagtagctgggattacaggtgtgtgccaccacacccagctactttttttgtatatttagtagaggcgaggtttcaccatgtgagccaggatggtctcgatctcttgacctcgtgatccgcctgcctcagcctcccaaagtgctgggattacaggcgtgagccaccgtgcctggcctaataacttatttagagtgttacatattaaagtaaatattgacagaaaattataattagccactcttcaaacttatttctgaattatgttattcatttttgtttttcaaaatagttgtacattaaaatacagaagattctttctagcatggcagtccagccaaatacaatatcatgtaaaatgtgtttgctgtaacctcccacagtatattgttagccaatttgagtaatgctagaaatgatatgttcttgtcatttaatttataaatctgcaactgaatataatctataaaagatcacattagaatttgtcacagaaacaatgtaagagaagtttggtaaaatacccaataactctaaaaataagagggttagtgtaactcttaaagagcctttagtcagagtcatgcaaagtaaaaactaatgtagaacatgcttattaatataaagtttcttttttttttttttttgagacagggtctcactctgttgcccaggctggagtgcagtggcatgatcatagctcactgcagcctcaaacccctgaactcaggcaatcctcctgcctcagcctcttgagtaactgggactacaggcatgcaccaccacatcactcctagctaatttttaagttttttatagagatggggtcttgctcagttgcccaaactgcttttgactcctggcctcaagtgatcctcctgcctcagtctccccaaatgctagaattacagatgtgagctgctgtacccagcctcaagtttctattttatactttccctgacttgggaataaaataaatagtcagtattttagcctgggtttaaagtagcaggtgcctagttaggagttgggtgtatcaccctgtttgtttcagcaaattacttatttaaacattgagaacaaactctcaatgtgtttgaaagcagaaattgtaagctatctgcagataatttttgaagtataagtttcatatatcagcacttatacttagcataagtgagtgtataaaatatacatgaacataaaattctacagaaagctaatattttgacttgattatatttctaaagtagtcataccatttcattgggttgcccttaaatgaccgtgagagagaattctgaagcttgaagtctcttccttctatactaattcaaataccaaaatgagaagcaaatataattcagaggacttctggtcaagattatcttgttagttccaaatttgaagtctcatctcctcccctttgcttcaaaaacataacaataatagatgaatcataaaaagaaaacattttaaacacatagccaaatcccaaaatgagacagctatttcttgatggaacagaagcagaaaaagcagtcagaacagtgagcctgctgagctggaaggaggagaagtggttgggagctcagctactgtaggccagacactagtgccagattccctgctagaaattaggagctggaatagatgctttattgaaataaagagcctgaatgaatgtgctaataataacagttaaattatatgtctagggaggcaagagtacacagaaacagcctcaccatgggatcttgaaacaaactgatactggtatggtgataaacccggccagtactgtctttagtatgattgcagggcaggagcaccgaggcaccaattatgagacctggtttcagtctgagactctaggaagccaccacataacctatagatttggaagtattaagccatattagataagcttgcataacaaaatacatgcggaaattaacaatagaaagatagcagtcatgatcataattaaggtaaatttatccaaataaaattaaaaactaatagaataattttgaaaatactttgagtagcctcaaagataaatgaaggaacaatattcataaaaaagaataaataggaaataaaaacagaaataagtaagaacatgactgtgagagagaactagttaactagaaagcttaaaatgaaaaatatagtcattaaaattcaaagctcagtaagcaacagtgatctatactggacactatcaaagagagttaataaattggaagataataattagaaaagattatccaagttatctttatggaagagactaggttgtcaggtcaaaatgcactccgaatatactgagcaagatgaataaaaataagccaatacctagacttgtggttgtgatgctgaagaatataaagcagcggtccccagcctttttggcaccagggacccggttttgtggaagacagtttttccatggactggttggtggtttcaggatgattcaagtgcataacatttattgtgcactttgtttctattattattacattgtaatatataatgaaataattatacaactcactataatgtagaaacgaggggagcactgagcttgttaatctgtatttgcagctgctccccagcattagcatcacctcctcagttccacctcagatcatcaggcattagattcctgtaaggagtgtgcaacccagatccctcacacgtgcagttcacaagagggtttgcactcccattcagggagatggtcactaaggtagtaacagtgtatttctctgtatctttcaggtagtgagttttaaaaagaacaagtatacctgctgttggtgagaaaatggtagaaggccttcctacattgctagtttaagtgtattgtcatcaccgtaaacaatctgatggcatctattaactttacaaatacagccttttcagcaatccctctcctggaatctatcccagagacgtaaaagtacccatatataacacatctaccaggagacttatcagccttattcatagaaacaaggaaactagatatatattggatgtccatcagcagaatgttatgatatattttacatgttttacatatatatgctataaacctataatacatctctactatttttactttataagtcagctctcttttagaatgattaaaaataaaaatatctcgcttcccttgtggacatctacatttctgtctggcttcatatttcttctgcctgaagaaatacctttaatattttgtatagtgcaggtaataaattatctcaacttatttttatctgaaaaagtctttttttgaccttcatatttgaaagatatttttgctgtgtataggatacttggctgttatttcagtgctttaatgatgccactacatttaggttggactgcatcggttctcctaagtcagctgtgattcttatctttgtgcctctgtatttaatgtgtgtgggtttttttgttttgttttggttttagctgtcctcaagattttctctttgtcttggtctttaataatttgaatttgatggatctaagtacatgggttcttttggtttttgtttgggggtggagtgaccatgggtattttctgacgtgcttgaatctgtttgattttttttcattatttataggaaatgctcagtcattatctctttgaatatctcttttgtcccattctttctctcttttccttctgggagtcaattagatgtatattaatgcatttcttattattttacagcccttgttggattctctgtcttgttttcttactctttttttctctttgtagggttagtttgtgcaatttctgttaacctgccttcaagtttgcaattcattcccaagctctgtccagtctattattgaaacctatttaaggcattcttcactgcagtcaccacattttacaaaatttctagcattaccatttgtctctttcttatagtttttaactctgctgaaattcccaatcaattcaaacaaattttgtagatcacagttcttttatattccctctttgatattttcagaatgttttatctctgtgtcatattctgctgatgactttgttcaacatggattcttttacttacttttttgtgtgtttcatacatttcagttgaatgttagacattgtatttaagaaaacagaggcagaggctgggttcagtggctcacctataaaatcccagcactttgggaggcttagatgggagaattgcttgaatccaggaattcaaggctgcagtgagctagggttgcaccactgcactccagcctaggtgacagagtgagaccctgagtcaaaaaaaaattaagaaagacagaggtaaattgtatggaaataggcataccttttcatctcttaagcaggggaagtaaactttttctgtaaagagccagatagtcaatattttttattttgtaggccagatagtctctgaagtctactttacctgatactaatataagtcagtcctccatattttgagtgacacatgcacagattcaaccaacgcagattgaaagtacatacagttggcccttcatatcctcagattccacatccacagatttaaaaaatctgtggatggagtgagcaactgtagtatgccactttgtataagggacttgagcatctgcagatttttggtatttccgaggcagggggatgtcctggaaccaatcccttaaaggtatggtatactgtatagccactcctgctttcttttgacttacgtttgtgtaggtatctttttccatccttttactttcaacctaactatattagaagtttctcatagatagcatatagttgggtggtgtgcttttaatccactctgccaatcctcagattttaactattgtggactatttgcaattaatgtagttattaatgtgtaactaccattttactttctgtttttagttggtttccctttttcatttgcattttttctgccttcctgtatggaaatttttttagaatcccattttgatatatctctggttctttttttctttttcttttcttttttttctttttttttttttttttgagacaggatctggctctgtcactcaggctggaatgcagtggagcaatctcaactcactgcaacctccacctctcaggcttaagccatcctcccccctcagcctcccaagtagctgaggctacagatgtgtgccaccacgcctggctaatttttgtgtacatggggtttcgtcatgttgcccaggctggtctcgaactcctgagctcaagtgatctgcccaccttggcctcccaaagtgctgggattacaggcatgagccaccgcagccagccttgatatatctatagtatttttttttcctcaggcagatttgctctagacattacattatatgtacatagcttatcgcagtctagtagtgttgatattttaccagttcaagtgagttgtagaaacctttgtccttttaaatcccttaaccacctttgttgataattgttttagatattcctttacatacattgagaaccacatcaatgttataatttttgcttcaactgtcaaatatattatggaaaactgaagaggagaggaaagtctgttgtatatacccatgtgcttgctctttccattgcccttttcttccaagaggtttgctgattgcttactttgagctttactgtttggcaactattttatgttcagattcccaaagactattcattatgaggaaacagtgacaaaatcatagtctgtttatctgaaatataaagactgaaatgacagtgtagagaaatgaagtcatcttctgaattaggcatttttcttggaatgggtacaaccctaccactactctacatcatggaagtcttaacgatttagggtaatacgataatgagaataccaatatggatctattaaatgaggagctgagtaagctccaaatttccctctagattggtaagtctataatttattatatgaaattcctaattattaccatactaagttcaaaagattttaacccaaatcctttagtaactgataaacctcattcttaagattcttgacagaaataatcttgatgagcttcttctcttcatgatctttccaatgctgttataattttgagggaattactcttattttcattaattctgttgcaaggaggaaaagactgactctgtgttggggtttcttttctctataaggcacaagacctaaatgtcattgaagaagtgattcgaatgatgttagagatcatcaactcctgcctgacaaattcccttcaccacaacccaaacttggtatacgccctgctttacaaacgcgatctctttgaacaatttcgaactcatccttcatttcaggatataatgcaaaatattgatctggtgagtgtaaatgaagacatttattatgattcttttttaagtattaaagcagagaatgtttaataagccttggtaagaactataatagtaagagtttcttctttcaacattaactgtatttgcagtctattttactataatagttgtggtaatctgtgtgtgtgttgtatatacacacacatacatatttaatacaattgaagtcatacttcatacagttttttattctgacttttttactttacacttagaccatgagcatttttctgtggtattatcaattctttgaaagtctcacattttaatttctatctagcccatgtttgtgtcctaaaatatatataactattatcccatttttgctcatttatttccagtattttatatcaattcataatgaatgaaaagtttataaataagtcttatctcaaattttaaaattatatttttgatatggttttaaagctggaattttactagtttttactgtcaaaagatatctttattttcaagattcaacacaggttgccaaattgctttccagaaaaactgtagaatttatgcctgtgggccgggtgtggtggctgatgcctataatcccagctacttgagaggctgaggcaggagaatcgcttgaacccaggaaatagaggttgcagtgagccgagatcacaccattgtactctggcctgagcaacgagagtaaaactccgtctcacacacaaaaaaaaaaaaaaaaaaaaaaaaggctgggcacagtggcttatgcctgtaatcccagcactttgggaggccgagatgggcagatcacgaggtcgggagatcgagaccatcctggctaacacagtgaaaccaaccccatctctgctaaagctactataatatatgttccatcaacacaaagtagtaaacaaagaaagacgaagacaaaggagccaggcttaaccaaaggagagcactgaaggcagttcccaagaatacactgtagtgtgtagaaccagtgcacagtgggtgtggcaggtagcaggtctccatagaaagagcagatttgagaatgttacttgatctgtttgactatttagagaggagttttagagttctgttaaaaagtttgtagctgtgttagagattggatatttgcaacatacaaccaagaaaagtctagaatctagaatataacaataaaatatatattaataatagataaataactcaatagaaaaactaacaagaatcgaacaggcactcccaaaagaggaactctaaatggctaataaagatatgaaacacataggatgtattaactgctggatactctggaatctacacaattaaatgtgagtttaacctacagttgagtatactgttgcaaatccattcattgattttcatggctttttcatgattgctggtaaacagaaattaatattaaaactcttctgtcagcttaatttcattggctttcgttaagctgcttcaactatatacctaacggttgcagctatagcaaaatattttgccatggacactcttgtcactttcctaaacttatatcgacatcatttaggtatcattaacagaatcggggaatttgggtatagttgccatcagtgcaatcaagataaagcagaaacaccatttcacacaaggatgtttattttaagaatcaaactttgacattttaagggaaatctttatgaaccaggactccatgtagcttcactgatatttaggatgtgtgtgagagcatccttagcaacttctcgattatttcatctctggccacatgtccttcttgttaactctgagttttaattaagaagtattggtgttaataagatctctttaaaattgagaagtgtcagtgttaataagattatgaaacaaagttttgcctaaggaacacctatcacgagttaactccgtcttcttttatgggatagattatttttgacaacatggtaaattgtggtttatagtctaagaattcctgttagttttatgctttgatagaagatgataatgcaaaagtaccagttattaaggaaagtaaagagtccatgggggctgaggggtatctcatgggagaatgccatccctgctgtcatctcagctctcaaagaaactatctggaactcaagcagggcctttatccattcctcttaacagttattcctgcaagcagtcttaaggattataacattcagtagaaatcgttctctgtatgaaggcaactttataggctagctgtttacttacttctgaaaagctttttctaaccatgttattcatgaatttgtccaaattcatttctatttcttcccagtagtatttttggaggtaaaatactgagtttaagactcattatgcttgtgggtaaaggtttcacaaaactctttccccttttacatgagaaattggccttgggttaagatgcttctagctcagttctctagaaatctaatggaggtagaatgtcagttgtgttaccaagcaacactgctatgataaaatgatgatgtgataaaatgacatttgattggtaagctgagtcattacttggaggactacgaatgaactacaaatacttgatgagaagccatcactttgggcttctccgaatgagagaattcttataactgggcatgtcctttacaaggacgtagaagctgagactgtcacaaggatattggtttctatttgagacatggtttctaaggtagggtggctattgcatctacctacagtagtctcattctcttgcatctgagctgtcatttgaagggtcaaagactagcccaaaaactgctataaggattcccaaggaaaacaaaaacctgtgagactatgctgttggcatgctgcttttcctatccttctatctttttaaaattaatctgatgcaaagtgtggccttttatagtcttgagactcttgatgtctaatatttcgtctaagaatatcacccaagaatgggcactgtaatattaaaatagtattttcttacatttgtttattaatgtatctctttcaagctccaggagatattcctggttttccaagatttattcagatctttacattctagaaatatccaacatgtccattttcagtcttcatgtttctaaactgtgtcatcccattcatttcagtctgcccttgtggcagtcctctatcccatctgttctaacttttacctttctctggacctccctcattccaatttcttttttcattccttcctatctttcttttttcctttaaaaaaatgtttaaagatagtcacctgaactatggactatgtatgtctgctaatatacacctgcagtaaatgggagagaaataatctctaattcccagtacctttcattgtgataggcaatattttctttgtattcctgacaaaagactaaaccagagatttttttttttccctgtggtcatagctgcagtagctgcaatattacacatcatttggagtatttagctttaacattttatttaaaccacatcaaaagccatttgcttcttttctaatcatcactagcttttattgcatacttgctaagcacttacgtgcaataacttacttaatcctcattaaaaaataaaccatgaggtatatttcattttagccctcaatttacagataaagaaaccaagttagaaagattaattaacttgtttactgtcacacattcagcaagtgatacagcgagaacttaaacccagagtttgatgataaggcctttgtttgtaataattctgcctaaccactatacacattcactaaatgctcccacagttgcctatgaaaccatctgatcatatccacaaacctaattactttctctttcaaaatcagttctaataatgtcaaatcagtctttattccatcagtggtgcaatgaggaacgttcttagtaaccaggcaattgatatccttaaaaatgtctctgagagccaggcgtggtggtacactgttatcccagctgctcaggagactgagtcaggagaatctcttgagcccagaaattcaagaccatctcttaaacacacacacacacacacacgaaagaaaaagaaaaaaaaagtctctgaaagaccatattaattttttttaatcaggacacacagaaccatgcaaagaatttaaactacatccatttgaaacacattctcctttggaagaagtgaaaagcagagtggaggtgaggaagtagaaaggacctcactgtaagtacacagtatagaaccatatagaagtaaaagcaggatgttaagttggacttatacccagtgctcacttttctgtcattgtcggaataatgggccacttatttacacttcacctgtatgcagtgaaaactgcattctcaggctaaacatttgactatatgctgttatgcagttcttaaaaccacataaacaaatgcctaaacatttttaagtacaccttctaaatgatgggaatgaagcttgagtgcctcatgtatatgacctcttttaccattcttaatccatgtgagctaggattattatcccactttacagataagaaaataaagatgctgagaggtttctcagatgctattaatatacattcctgcctaaggatcattgtcttggatagttatcacatgttattgcagggggctttatgtcattggccctttcgccatccctaggaggaagggagagcagggctagagaagggaaatagtaggcttgagatcacttagctagcaagtcagtcaaccaggccctgaatccaggttctcattctattaaatcccgtgttttcagcattcacttggataaacctaattaagattccaaatgagcaggttttccaacaactttttgttgaatactatcatccaaaatagtgctgggcacactggaaattcatttaaaaaacattttaaactccttttacatattttgaaaagatgctgtgataaagatataaataacatctctactgtgtgcctttttcagtactttaccttccccatctatcccccaaagatccctgaaattttggcttaaacaagcttttgctactttcttctttcatagagttaaccttcagaagttaactctgtgaaagactgtagaagaaaaaagttggtggaggagacgaatctactgttatttttagtgggcagggagttgagagttgattatttttggttaagacatttagcagcactcagtatctcagaagacagaagtggctaaccttggagcacttttaacgtctgcagaaggaattagatagatgtttttcaagtgcctacatttttattacacactggtgcctatctcgcccatctaaaacataaggtgatatgatcaggctgaattaagcagcaagacaaggtagaatatgacaccaaacaagagagaacataaaataaattgtctggttacctaagaaatggctgaatatgagtagaggacagatgcaatgaactataaccattgtatagtaaggtacaggcaagaaatcttgttatctctggacattagatcttgtgtatttccagacctgaccatccttatcaagctctaaactagcactttaggctactgacttgacagtcccacaattgttaaacaaggttaaatcataattcttgattttctgcaaaaaccaatgcaatataaaatattttcttctatagtctttcttatcccaatatatgacatcaatatctacccagttgcttaaggaaaaaaaaaagagtaagaaaggagaataatgagagctcgttagaataccggtaggagattgcagatttaaagaatgtaatcaggtgcgtttgagccaaaacttgaagcaggtagagagtgagctatgcagctatctggggacagagcactctaggcacagagaatagtgggtgggacggagttatggggaactggctgggaaggtggagtgaacattctgtgataatgaggggcagatggttacagggtatgcatatttgtcaaaactggttgaactgtaccattaaaatgagtatgtttattttattgtatgaaattgtacctcagtaaatttactactaaaaaataaattccctacagtggacttctgcttaggatatagaaagctaggaagagttctaccctaacaaagagaaaaagaggtaaactacaaaatcataacttttcttgaacctatcaatgagctgaggtcacaggacaaccaaatagtctagatcccaaggaggggtcatcggcccacccacccctcaagttgaggtgagacaccaggactggatcacctgtggcagagcacaggggtaggtagccaccatacaagtgggtaaaaagaaatcagatgcaattttaataacttgctaaaggttgagtgtggagtagcatgacattacagaacacccaggagacccaagcaccagaggaatttgcactcacaggctgttttccactgagactgggggcacagcaggaagccagagagcctcccaaggtgatgtaccaatagaaaaatgcgtagcatcattcccctgccagacctttctttcatatggtgcaaaagccttagattgctggcaggggtgggggtgcggaggggaggggggtgcggagaggaggcgggtgcagaggcaggcaccaaaccttgttgccctcggggcataggtagagacccattattgcacgtaaaagataaaacaaaaaaactctctacttctgggtaaagggcaggaaactgtcgcagccccagggttctataagagtaccattagaggtatcctaccaacaactcatcacagatacagggcaaagtctggctgccatcggaagaaagggaagagaaagctaagaaagccttatgccctaggcccaggcatagagagccccatttaagactgaggtcttaggacagcacgtagagaatcccctaccttctgccaccagcctagcaagtactgagtaacaagcagcagcatctgctgctgggaaagatcaagggcatggatacacaccctgctctgggacccaggtatgcagaactcactgaaagcagaacgtggagcatgaacgttgaaaaacctgtggcacttcagatcccagcaaagcacaaggcatcattagaggatgtggtacactgaaggtagccacagcaacagcaaaactcaaatttagctcaccttctgagtgaatcagctcaacctccaagcctgacctaagaagagatgtgccctaatttatcataaatagtatttctgtcagtctctacagttctacacatgatgtctaacattcagccaagcattatgagacataaaaaggcaagaaaaatgtaatggtggcaacagacccagactcagtgatgactcagatgttggaactgtcaggctgggactgtaattatgatttatcagtttcaaagatctggtgtgaaggtcaactaagtgggacccatcaggcaaatgcagcccacagcttgcctttgtacagcctgtgaaatacgtatgttttttacatttttaaagggttgtttaaaaaaaaaaaagaagaatatgttacagaaactatattgggacccacaaaacttaaaatatttactacctggttctttatagaagacatataccaacctttgtcctgggggaaaaggtgacaacatatataaacagttccagagagagatgggaactgtaagaaaaaataaaatgggaatgctagaagtaaaaaacatgtgacagacaaagaattgctatgactggctcattagtgggcttgtgaaaaaaatctgtgatcttgaagataggtcagtagaaattatgcaaataaatacaataagaaaaacatgtgaaaaatgagaacctatcatccaagagctataggacgatatcagatgattcaatatacatataattggagtctcacaaggagaagagagaaagaacaggtcagaagaaatatttaaagagataatagctgagaattttccaaaaatactgacatcaaaccacagatccaggaagcccagagaaccccaatcaggataaatccatttttttaaaagacattatatttaaacatctgaaaatcaaagataaaagaaaaaacacagtcttgaattcagccagagaaaaaagaaacattatatacagaggaacaaagatagtaacagcagtttacttggcagaacctagctaggcaagtcagataatgaagtgacatctttataaggctaaaatgaaaaaaaaacaaaatcttaccctcaaaaatgtctttaaaaactgaatacaaaataatgacatttcaaacaaaactgagagaacttattgctagtgtgtactatagactagttaatggaagttattcaaacagaagaactatcatatctgatagaaacttggatctacaaaaagaaattaagagctccaaaaatagcaaaaataaaggtaaacataaaaagctttttcttatgttgattcactgtataaaataattgactgttggaagaagaggtcctcaaactttttctgtaagtgagcagattgtaaatattttagtcttcacaggccacatagtccctatcacaattattctactcaacaattgtaattcaatggcagccatagactatgtgtaaacaagtgggtatggctatgttccaataaaactttatttacaaaaacagacaacaggccagatttggcccacaggctataggttgccaacccattttgtctaaaataaagatagtaacaatgtattgtggggtttataacatataaaagtaagatgtgtgtcagcagtagcacaaaggatgagagggaagaattggaagttgacacatgtgtgttgggagataattttccacagatttcatcttgtgagcaaaggcactgactgtcctttgctctagattatcttttcaaagatatttgtatctccttctggagtaaaagataggcatggttactgaccactctaagagattcgggttccctaagctcagggttctgtcctttaacataatttactgcatgtgcaggtgttgtctgacccttgtcacataaccctaagcaaactggggcttggggagccagtgtggtaatgcagatgctctgatcactgctattgctgtgactaacaaacttccctccgtctctgacccagaaatatctcttcttccaggatccatgaactatagactggataacttgttaactcacaagtagggtaccatatcacttttcacagttcttcacagtgtcaagtagtataatattatttgaagatagactgtgataattaaaggtgtatagtataaactctagggcaaccactaaagaaaacattaaaatagaaatataagtagtaagtaaaagatgaagataaaatagaaatcataaaattatacccagtccaaaggcaggcaggaaaagcagaataaataatagtggaacaacaacaacaaaatagtggaacaacaacaacaaaaatccatccatgtatttaaatcctacatgccaataattaaatcaaatgcaaataatcctgatgcctcaattaaaagacagaaattttcagattggataaaaagcaagacctaactatgtgctgtctataagaaacccaccttaaacataaagaaatagattggttaaaagcaaaaggataaaataacttttactacgtaagcattaataaaaaaaaaaaggggtaggatgactatattaatagcagacaaagtagacttcaacacagggagcattaccagggataaagagggactccatgtaatgataaagaagtcaattcaccaaggagacgtaacaaccataaatgtgtatacaacagagcttcgaaatgcatgaaataaaaactgatagaatggcaagaagacacaaacaaacccataattggagaagtcaacacttctttctcagtaattgatacagcaaataaacagaaaatttgtgatgatacagaagacccaaacaatactaaccaccaacttgatgagttcacatttatagaacataccacccaacaacatcagtgcacgtgaaccattctctaagagagaccatgtatggggccgtaaaacaaacctcagcaaatttaaatgagatgagatcacctagagtatattctttgaccacagtgaaattaaactattgaatagaaatcagtaagaagagccaagatggccgaataggaacagctccagtctacagctcccagtgtgagcgatgcagaagacgggtgatttctgcatttccaactgagataccgggttcatctcattggggagtgccggaaagtgggtgtaggacagtaggtgcagcgcactgcgcgtgagccgaagcagggcgaggcattgcctcacccgggaagcacaaggggtcagtgaattccctttcctagtcaaagaaaggggtgacagacggcacctggaaaatcgggtcactcccaccctaatactgtgcttttccaacggtcttagcaaatggcacaccaggagattatatcccgtgcctggctcggagggtcctacacccatggagcctcgctcattgctagcacagtagtctgagatcaaactgcaaggtggcagtgaggctgggggaggggcatccgccattgccaaggcttgagtaggtaaacaaagtggccaggaagctcgaactgggtggagcccaccacagctcaaggaggcctgcctgcctctgtagactccacgtcttggggcagggcattgccaaacaaaaggcagcagaatcctctgcagacttaaatgtccctgtctgacagctttgaagagagtagtggttctcccagcatgcagctggagatctgagaatggacagactgccttctcaagtgggtccctgacccctgagtagcctaactgggaggcaccccccagtaggggcagactgacacttcacacggccgggtactcgtctcagacaaaacttctagaggaacaatcaggcagcaacatttgctgctcaccaatatccgctgttctgtagcctccgctgctgatacccaggcaaacagcgtctggagtggacctccagcaaactccaacagacctgcagctgagggtcctgactgttagaaggaaaactaacaaacagaaaggacatccacaccaaaaccccatctgtacatgaccatcatcaaagaccaaaggtagataaaatcacaaagatggggaaaaaacagagcagaaaacctggaaactctaaaaatcagagtgcctctcctcctccaaaggaacgcagctcctcaccagcaacggaacaaagctggacggagaatgactttgaagagttgagagaagaaggcttcagatgatcaaattactcctagctaaaggaggaagtttgaacccatggcaaagaagttaaaaatcgtgaaaaaaaattagacgaatggctaactagaataaccaatgcacagaagtccttaaaggacctaatggagctgaaaaccaaggaacgagaactacgtgacgaatgcacaagcctcagtagccacttcgatcaactggaagaaagagtatcagtgatggaagatcaaatgaatgaaatgaagcgagaagagaagtttagagaaaaaagaataaaaagaaatgaacaaagcctccaagaaatatgggactatgtgaaaagaccgaatctacgtctgattggtgtacctgaaagtgacggggagaatggaaccaagttggaaaacattctgcaggatattatccaggagaacttccccaatctagcaaggcaggccaacattcaaattcaggaaatacagagaacgccacaaagatactcctcgagaagagcaactccaagacacgtaattgtcagattcactaaagttgcaatgaaggaaaaaatgttaagggcagccagagacaaaggtcgggttacccacaaagggaagcccatcagactaacagctgatctctcggcagaaactctccaagccagaagagagtgggggccaatattcaacattcttaaagaaaagaattttcaacccagaatttcatatccagccaaactaagcttcgtaagtgaaggagaaataaaatcctttacagacaagcaaatgctgagagattttctcaccaccaggcctgccctaaaagagctcctgaaggaagcactaaacatagaaaggaacaaccggtaccagccactgcaaaaacttgccaaattgtaaagaccattgaggctgggaagaaactgcatcgactaacaagcaaaataaccaactaacatcataatgacaggatcaaattcacacataacaatattaaccttaaatgtaaatgggctaaatgctccaattaaaagacacagactggcaaattggataaagagtcaagacccatcagtgtgctgtgttcaggaaacccatctcacgtgcagagacacaaataggctcagaataaagggatggaggaagatctaccaagcaaatggaaaacaaaaggcaggggttgcaatcctagtctctgataaaacagactttaaaccaacaaaggtcaaaagagagaaagaaggccattacataatggtaaagggttcaattcaacaagaagagctaactatcctaaatatatatgcacccaatacaggagcacccagattcataaagcaagtccttagagacctacaaagagacttagactcccacacaataataatgggagactctaacaccccactgtcaacattagacagatcaacaagacagaaagttaacaaggatatccaggaattgagctcagctcttaaccaagcagacctaattgacatctacagaactctccaccccaaatcagcagaatatacattcttctcagcaccacaccacacttattccaaaattgaccacttacttggaagtaaagctctcctcagcaaatgtaaaagaacagaaattataacaaactgtctctcagaccacagtgcagtcaaactagaactcaggattaagaaactcactcaaaaccgctcaactacatggaaactgaacaacctgctcctgaataactactggatacataacgaaatgaaggcagaaataaagatattctttgaaaccaaagagaacaaagacacaacataccagaatctctgggacacattcaaagcagtgtgtagagggaaatttatggcactaaatgcccacaagagaaagcaggacagatctaaaattgacaccctaacatcacaattaaaagaactagagaagcaagagcaaacacattcaaaagctagcagaaggcaagaaataactaagagcagagcagaactgaaggagatagagacacaaaaaacccttcaaaaaatcaatgaatccaggagctggttttttgaaaagatcaacaaaattgatagactgctagcaagactaataaagaagaaaagagacaagaatcaaatagacacaataaaaaatgataagggagatattaccaccgatcccacagaaatacaaactgccatcagagaatgctataagcacctctacgcaaataaactagaaaatctagaagaaatggataaattcctggacacacaccctcccaagactaaaccaggaagaagttgaatctctgaatagaccaataacaggctctgaaattgaggcaataattaatagcttaccaaccaaaaaaagtccaggaccagatggattcacagctgaattctaccagaggtacaaagaggagctggtactattccttctgaaactattccaatcaatagaaaaagagggaatcctccctaactcattttatgaggccagcatcatcctgataccaaagcctggcggagacacaacaaaaaaagagaattttagaccaatatccctgatgaacattggtgcaaaaatcctaataaaatactggcaaaccaaatccagcagcacatcaaaaagcttatccaccatgatcaagtgggcttcatccctaggatgcaaggctggttcaacataccaaatcaataaacataatccagcatataaacagaaccaatgacaaaaaccatatgattatctcaatagatgcataaaaggcctttgacaaaattcaacaacacttcatgctaaaaactcaataaattcagtattgatgggacgtatctcaaaataataagagctatctatgaaagacccacagccagtatcatactgaatgggcaaaaactggaagcattccctttgaaaactggcacacgacagggatgccttctctcaccactcctattcaacatagtattggaagttcaggccagggcaatcaggcaggggaaggaaataaaggatattcaattaggaaaagaggaagtcaaattgtccctttttgcagatgacatgattgtatatctagaaaaccccgtcatctcagcccaaaatctcctcaagctgataggcaacttcagcaaagtctcaggttacaaaatcaatgtgcaaaaatcacaagcattcttatacaccaataacagacaaacagagagccaaatcatgagtgaactcccattcacaattgcttcaaagagaataaaatacctaggaatccaacttacaagggatgtgaaggatctcttcaaggagaactacaaaccactgcttaatgaaataaaagaggatacaaacaaatggaagaacattccatgctcatgggtaggaagaatcaatattgtgataatggccatactgcccaaggtaatttagagattcaatgccatccccatcaagctaccaatgaccttcttcacagaattggaaaaaactactttaaagttcatatggaaccaaaaaagagcccgcatcgccaagtcaatcctaagccaaaagaacaaagctggaggcatcacgctacctgacttcaaactatactacaaggctacagtaaccaaaacagcatggtactggtaccaaaacagagacatagaccaatggaacagaacagagccctcagaaataacgccgcatatctacaaccatctgatctttgacaaacctgacaaaaacaagaaatggggaaaggattccctatttaataaatggtgctgggaaactggctagccatatgtagaaagctgaaactggatcccttccttacaccttatacaaaaattaattcaagatggattaaagacttacatgttagacctaaaaccataaaaaccctagaagaaaacctaggcaataccattcaggacatagacataggcaaggacttcatgtctaaaacaccaaaagcaatggcaacaaaagctaaaattgacaaatgggatgtaattaaactaaagagcttctgcacagcaaaagaaactaccatcagagtgaacaggcaacctacagaatgggagaaaatttttgccatctacccatctgacaaggggctaatatccagaatctacaatgaactcaaacaagtttacaagaaaaaaacaaccccaccaaaaagtgagtgaaggatatgaacagacacttctcaaaagaagacatttatgcagccaaaagacacatgaaaaaatgctcatcatcactggccatcagagaaatgcaaatcaaaaccacaatgagataccatctcacaccagttagaatggcaatcattaaaaagtcaggaaacaacaggtgctggggagggtgtggagaaataggaacactcttacactgttggtgggactgtaaactagttcaaccattgtggaagtcagtgtggcgattcctcaaggatctagaactagaaataccatttgacccagcaatcccattactggatatatacccaaaggattataaatgatgctgctataaagacacatgcacacgtgtgtttattgcagcactattcacaatagcaaagacttggaaccaagccaaatgtccatcaatgatagactggattaagaaaatgtggcacatatacaccatggaatactatgcagccataaaaaaggatgagttcatgtcctttgtagggacatggatgaagctggaaaccatcattttcagcaaactatcgcaaggacaataaaaccaaacaccacaagttctcactcaggtgggaattgaacaatgagaacacatggacacaggaaggggaacgtcacacactggggcctgttgtggggttgggggagaggggacggatagcatttggagatatacctaatgttaaatgacgagttagtgggtgcagcacacaaacatggcacatgtatacatatgtaactaacctgcacattgtgcacgtgtaccctaaaactgaaagtattaaaaaaaagaaataagatatctggaaaatctccaaatacttggaaattgaacaatacacccatgtgtcaaaaagaagtttacaagggaaatagaacaaatttaaggtgaacataaatgaaactgtaacatgtcaaaatttgtgggacccagcaaaagcccagagagaaatttacagccttaaataagttaatgtctgcacagcgcaaagtgctttgcgcatggtaagtgctcacagagcgttagctcttactgttattaggtgtgtatcagtaccctcatttacaaaatgacaaagttgccacattatcattattggttcctatgcagtagatgctgcaactttgtcactttgaagatattataagaagaggtgggatttaaacccaagcagtccgacaccaggtaagttctctaaaccactgcatcatgctacatctagatgttgagtgttttacaagtcacattgctagtatcagaggcaagactcaaatgtaagccttctttgagtagttcattatccactttaccatgatgtctattctaattatacaggtttgatctgtcttatctcacaaattacactgtgtctttcttcaagagagaaaatggtatcatctatttatttccctggtaaatcctcgggagagctcctctgctgaatggattgtcaatatatgtattgattaaaatacagtaacttgaggggaaactcaagtcaatgaggaaatatatatgtattttacatgtttatcgttgtcttaaaaaataaaaataaaataaaataaaacttagctgtctacttctacctcttaggagagtggccatttttagcaagcaagcattttgcctgaggagcacatactagctcctttttattctcctctactccagaaaagcttctcatttctattaatctgtgatctattaataataatcattcacttgtttcatgacaggtggttaaatgtgatttgacattactcaaagtaaacaactgattaatcagtatatgacagtgggcaatcactgttcaaagctaatagcataatggaaggtaatatgctgtacttggatttcatgagttacagccaaatattgtaggtagaggagggttgtaaaacatgcgctttggaaaagtaccttcctttgaaaggttgtctttgaattacactgacaaagcattcatccccactttcactaaaggttttacttgaatgttttctgttattggctgtgtctcatgcagagattttcagaggaataaaagttcatctattttaatagttttaatggttgctatacaaatggataaaagccacacatctgttgtagtcatcatcactaaaagtactattatatgcaaaattataacctgggagtaggaaatagaagctcttatctttgaatgaattgtttcacgttctttgctggtgttgcagtcagacaacatctgaaaggtttggctgaacaacttacacctttcacttagatatctcctatttgaaaaactaagctaatgctccattttgctacataggaattgccggagacatgataaagtaggaagaaatacctgagctggagtcctactcctcccacttgcctgggccaccccagtctagtttgtctctgatcctttttacaattctgtaggacagagatttttatcagcctcatgggattgtcatgagaattaaacaaatagtatatgtacagcacacagtccatgataaacattcaggatagatttgtttccttcggttttgacacataaattatacttcccttctgcaagtggttgttttatcattttctaaaatcatgtgagtttgaatgcaaaaacatgagaatgtcagctttaaaacatacaaatgagaaccagtttgaaaaaggaatttagttggaaacccagcttcatgcctcctctgcagctctcccagtggaaatggaaattccttgtggcttagaggaaagccagtataggccgcagagtcaacaaagcaaaactgtcattgcattactttgttcttggtggtgtgacacataagtacactcccttttgttggtttgtcgtgtctttgagtagtaagtgaatactgtgagttccctttaactctgattatgtgccttttgttatctcgattagtgattatcaaagcggatggctccacatgccccagagattgcactaacagttcatccgtagaagcatggaaagaaaatattagagctgttatttattcatctaaaaataaggagatttagttttactaatagtattggcctttacaaccttccagggtctgtgtcagcctcagtactccagatatcccgagggaggagataggagttcctcaacttgtagggcttggcatacatgcgctcacctgttcattcacgtaaagcttagtgtagtatatgtgttcctggttacagtatctagatttagttaaaccctcacgaaatagcgtgtttccccacacactgaaggtgatagaaaaatataagcacatatgacaaaagataatggcagagctggcatccccctcctcctggaacaagtgccacattacaagggaaaaacagtgatgaaccagtctaatctcacagaaaatggatccataaaagttatcaggaagacttttaggcactatggatttaatattcactgtaataaacgatgcatcttaccgtgggtgaatactgtgcttgctgatggtcatgtgaaattgctgtgattagtaatctgtaattacccagattattttcaatgacattttaatgagtacaaaaaacatgttttgtatcattggtttttttaatctaattgattttatctttatctcattcttttaaatttattttatgaacattttataatatgtaaaacatcagtgctgtagtatattgcatgatttataaagaactagaacatatattgcaagcacatcctcatttttttacttgtagatgtgtacaacttgaaaagtttggaaacctctggtctggattctgactgatcatcaaaatcacctggagagcctgatgtataatagaaggtccctgactaggccctgggatcagaatttcacaaggcttctcagctacttctgatgatcagccatgcttgagaactactccttgtctgtatgatctactgctataaacaaaacaaaaatccagtagtgaaatatcagctttcagcatgttagaaagaaaaaaaaaattcagtaagcctaaagcatatgtaacatctatctactttttaattaccatttttttattttttagaatgtgtttttaacagatatgctcctactttttaaatattttttggtcaaagaagataatatgcataggtgttagattgacccatatgaaatttctaacattaaaccatttttttaccaacaaaattggcatttcatatggttaaccaattcttttctcagaaaaactatgctcagtttacaacctgtgaagatatttacacaaaaggaaagcatttattttgtgtattcattgttgcatattttaaaaataggattttaatctattacaatatgttttgctatctgtgttgtgtcttttttcagatatttattcactatattataaaaatcaatttttggacctgctgtgtctaaactctgtgaacaaaatattaatcccagaaactcaaaaagaacttaaaatccgacatggggaagaacaaggcccacaggcacgtagcgaaaagcccacttgtggacaaaataagcagcttgcaaagtagctggtggtgccagcaaactgcttgagaaagaaatggtttatctggaatcacaagcagtgtcaccagccatgagctgcctttgttctcactcattgccacagaattgtgaggcacatgcttgttaatggctgtggcgccagctaagtctctttaccttccagaacaaatgcatttagtggcatttatgtaatatagtgtactttccactagaatggataagacaaaagttattgtactcttaaacaattagcatttaggagagtaattctgaaagaaaatgcataaaaacgtttgtgaaggattgtttgtaacttaatatattttacctataaaatagaagacataaaaggtaatgctcaactttacaaaaacacaataattttttatatttttgcatgtctgactataaacacctaaatgttattctcttgaatttaaaagggatctgcagtcttcttgatttatgaacattgtggttttaaaaataatttgctgaaaaatgatgttttgttttcattttttagtgacaaatatttagggaccgtgtatttccagaatgctactgtgttaatatcttgctgcatactttgggctgtgctataacatgaagcaaaagtaattataggttgctatttgttatccctggtgatcatgataagggaaatgtggctaaattcatagataatccccaaaacatcattttagccattagtttcaaattctttcctgttaagcccttttgagagagagagagagagagagagagagagagagagagctaatattaagcttcaaaagtgataggctttagggtttagctttctctcccgactttctgttggatactgctctataaacgaaatataaatgcaaggtcaggcagcacaagaaagagtagaattcaggaggctacttaattcacagaatgaataatcagccctggatattgaggggttgcctctgattcggctatcaaacccaacggagagcaaactgcgtttaggagggctagtgaattaaaagccgggtcactgtaggaatggaatcatgatagtttgactaccatgtgagaaaggcggctactaaaaatacatttcatacctcttcttgtttaaaaaataacactttacattacaggtgatctccttctttagctcaaggttgctgcaagctggagctgagctgtcagtggaacgggtcctggaaatcattaagcaaggcgtcgttgcgctgcccaaagacagactgaaggtaagaaggctaaagaaatgtccacttgacactgccgtgtcccttgatgtaaatgttagtgtcttagcagaccctatccagaatcatgctgcttatccagtacatagactagaagggctcctcagaactgtgacaaaggtttctgacagcttttcaaaagaagcattaatactttcatgccactgcatatcctacaagtagccatggcatgcactataattcatatactgttaataaaaggacaccttatttttttaacccagtgaaacaaattcggccttaagagtatcatcaagagttaatgggaaggtgatgatgaagatgatcacaagagtagctaatatttccatagtgtgactcagtgccacacaggttctaaatgtgttatatcaagctcattcagtccctaccacagccctttgcggtgggtagtggtatcatcctaatttttcagatgaggaaactgatgtacagtgaggttaagaaacttagccaaagccatacaactggaaaatgatggagcctgcagattgaaacccaggaagtctatctccagtgcccacattcataattgctgcactgtttactgtgtgcctgggatgtaatagtggaaagagatgcacttcgtggagaaggtgggggaagtgctgtatttgaagaaggcatttacatctgtttgatagatgtattcctgaagcagtctcacaatataaaactcatacttcaagactaattatcccataagaaaaagatgtaaagaagatcctttggggaatgcatgaatgtacagcattgcagcttacttttactttactgttctttttagttttttcttcattagctctaattttttagagtgctttcacctaaattaccaacacaggaggtcatagtggatatttggccttcatagtgttttgtcacagttcacgtctgttccagtgttgttactgtttttgggggctatgtttttcagcactatcactagaaccactgcttaatgaatgcttgagagatattgttgtaggatataaaaatattttcaattataataacagagtttgtaaaataacagcacattagtcatcataatcatttactgaagttccactgtacataaacaacagggagattcacacggtactgtgcaaagatggcaaatgttctgtttatcagccaaagtggcaccaccatgtggtaatagcataaaaacaggttagagttcactgggccctccagcttggatgtgttcctattccagataatttttttaaatatagagaattcatattgtttccatttttacataaagtaagaccttggtttgttggttggtttgggggtatttttgtgggatttttttgaactatttcaaatttatgtaaactataccatgtgaaccagtacaaaaaaatctatgaagattaaagtggctactcccaggaagtgatggatcttggtgtgtaagctcagtcaagaacaaagtagaaatatcgaggctgccaaaaaaggacactgcaatggagtctggggaaggttaatcttgtagttcactgtaatacttaccttaaagcaaaatgaattacagtgtgcaggctaagtgctggaatgttaatatttgttcatttattatactatattcaaaaataaaatgtcatttatatttgagacagtgacatataaacaaaaatgtaactcttttcgtttttcagaattatggctaaatagagaaaataattgatctatggtgggtcccaggcaagttgactctgatttagagcaagatcctattgaggccaaggtcatgggtaaatttcttaagagggccagttaatttggttctggaacatagcaagaagttgtactcctgacctcagcttgccaactcacttcatggttgcaaaaggatagaagatggatgattcagtttaaaaacaaaacaaaaaaaaaaaaacactatcaccagtactagaaaagattacatttactaaaattacatttacccacagatggtgagtcatcctagttggtttaaatgatagcatattattaccacagatgttactagaaataaaaggctgtttatccttacaatcaagccttatctcaattattttaatcatctttttggattgagtgtttataataaaatgagtcacttaaaatctctagagtttaattcacagaataccacggtatctaaagttgattcaaaattcaagctgtgttgagtaatgtttacatgatactacatgacagcacattatagtctttggagtagtttactaatatatactgataaaataattgtcgggtgtgtaataatagtttcatacatgatattgatgtaaaagagttggtttcaaattggaaatgctgtcttaataagccctctatgaaaatgtggaataatatatactaattgatttgttgtttcttaaaatatataaattaaacacttagaaactcagaattctttactactaccttctgggttgttaagaggatcacagcgccccttactcatgaaaaattcaccagctaatgtcagctgaagccgatgagccaaaagttttagaactttcccttgcattgtagaattgaagccaactttgtagaagtagtattcttccaattttgggcaagtaaacagtaagatctggaagcccatggaagagtaattgacttccaaccaaataaaatatttttcaatcaaatattatttgacatagccttctaaaatatttgtgtaatatcctatgtgggaatgcatactatttggataaatctgtctatatagttaaacaacttggctgttcagagtaaatagtattaatatcattctaaacattctcttcttactggtattctgtgaagtctgggaaaggcaataccaggtaattattttttccggagcctcctgcttaaacagagacctaaagaacaggctctgaaatcctgagtcacttatttctcctttaggatttggaaggaaataaataaagttagtatgtcctctgggagccgacttagaagccgcagctcaaagctctcactgtctgtatccacaacagggcatgttcctggctcgcattttgcttactgtggagcaatttgaatgtcatggtgatgggtcagaattcttccagatccgtgcgtgttctcataccactaccacctcagattttattatgttgggctctcaagtcccctcttttcttcagtttagtgaattatctatgtcatttgaggattaagaattttactgtatttagtgtttgaaaactaggtagtgcttttcaaggggaattaaccagaagataacttatcttttagtgtaaataagaaagtgtggaataatatgttattgacattaaccaaacttcatttactcaagacacttgataagtcataggaattaaaagtaattaccagtttcacactaaatgatttttaaagcctttattttatatccactttttagaatactttcatggttgtttttagttgcataaagaaaaatataaaaaatcatatcaactaacttgcttaaaacctttccctttgctcctattcaggggtctcttccctatctcaccctaagcatctttcgtttctttgtcagttctctatccccagagcagattcctgagtgctgtactgggagggccccttggggtcccacaggaacaacccccatgtgtccacagtcactctcttctgcctccccacacatccacactcctcgtgtatctctacctgtggaaatatgaatagccagcatcctccctctaactcaaaagtactgttagatcccaaaccctagaaattctcatttctcaagtcattcctttccctccacgttgccgccctcccatgtggctgctccacatttctcccacagtctattgctataaactcctaattggggtctccacttccacatccttcttcctccccaggtgttcttagccctgttgccacccttacaccctgctctgatccagcacacaaggcacttcatggcctaactcctgacttaagttgtgttctttttcctcctacggatcctgtgctccaacgctgtcagccgctggccgatcgtcaggtggacagagtccttgcatgccaggcctttgtgtatgcagcttctgggttctcacagtttcatggcttgtctgtcaggtgagccgatcatgctccccgctttctatgaagcccactctgattcacccacgcacactcggtggttttctccacattcctatggcacacgtatgtccctccattatagcaaaaccatcccccagcacacccatctcattcaatacatattcgtggggtaaattaacttcaccctgcctctggattcctatttctctccttcttctcagccaaaatcttgatttctcctttggtccttcaactctccttattcactgcacagcattagtgcagaacattaaaggagggactcccagtgaggagtgaggcttttctccatggcttgctgtcccaaggacctctcagcccaggctctctggtggaagactaagggtctcttaccgctaagctttccctgctagttggttttcctgtatttggcccttctccttctaccacccttctccttctgtccccagatttgcttctcaggatgtatgcacccacctgtccctttacattaatttgcatcatcatcatcatcaccgatatcacctataatatacaagcaaagcatctcttacaaatgtggtttgtttcttcctactgcagctcgttattttacccccactttgaccacaacattgctaggacgttggggaaacagaagtgtgtaagacaccacctctgccctcagaaaaatgtatcatctttcaggagagaaaggcacccccttgcgttgcagagctgagtagagcagggcactttacgctgcgtgtaaaatgaatggtgtagaagttaagttctggaagaaggagtggagacactgctgggaagaactagtcagggaacactgaagagaaacctggacttgaccttctctgtcttaaagggatggtaaggtttccataaagctgggatgaaagagaaatccagatggggaaatctgtgtgtgagtacaagagaaggcccaaggcaagttcagcttagtgtccaactggaacaataggactcccctatttctctctgctgtattaatgtggcttgtattatttaatggtacagtaaagtaattagtggctttcaaactctttagactgccacccacagcaaaaaatacattttacatcatgatacaattcacacatttatatacaactgaaatgaaagtttgataaaacagtacttaccatcattaaatgtgatgggctccgatattgcctattctgttttctttttttaaaattgctagtcagacccattaaattgatttaatgatccagtattatttagtaactcagagagttttaaaaataatgtgtcaaggctgggcgcagtggctcacacctgtaatcccagcactttgggagctggaggcgggcagatcacgaggacaggagtttgagaccagcctgaccaatgtgatgaaaccgagatcatgccactgcactccagcctaggggacagagcgagactccatctcaaaataaataaataaataaataaatattaaatcactgtttttcaaagtgtgatcctcatagcatcatcagcatcccctaggaacttgctagaaatggaggttctcaggccctaccccagacccatggaattagaatctatggggctggggcagtcagcgctttaacatcagccgctgtgtgaactgatgcctgctccagtttgagaagcacagtactaggtaattgctccaaacacaccagccctctccactcgtagagccttgcctggctcactctccctgctccagatatctgctggcctcattcctgcatgtccttcaagtctttactctcatgagcaaatgaaatctctctctccatcatgcctgcccgaccttccaggtaacatttctgcactcccagccccccaatcctactgtatgttttcttgttccgcagcattgtcatctagcatactgtataattatttattattatcctcctagataatgtaagctccaggaggccaggggtcttcatattttgtttactggggtatctgaagtgtacctggtacatactgggcactttaatatttgctgaatgggagggagggaggaaatgagaaagagagggataccaacgaacaatgggcctgttgaccataaagtgctgcttcaagaaaacattctttgaagaacagctctccatagactcttaaaaggtcagcttttattccaaaatattataaagaagctcagttaagactggaggtcttggtcactttgttggaatagttgctttttaaaagtctacattattccacatttatgcattcttatagctacaaaaccctactgtgaagacctccactttagtagttctcatcaataagctaattcctatgtaaattggcctaactaaattttcaatagtttctcagtggttctcttcttgactgtcacctgcagtgatttcatagttcaagcagagtaaaatattctgatttatggtattaggataaatttttccagtgatctcattttttcctatttctgaacctttctcagagggtgaagagcatggagggcctgtcaggctctatgagagtccaataaagagccactgtttgctttttctggttcattctctctactttccctgatccatgtagagcatgtgtatgttcagggcctgacagaaagtcgaggagaccgagtgcctgacaccgtccaccagcccaacagcaaaacctcttcttcagactaaatctgcttctagcttatagctactttaattgtacaaatgacgtcatttgacttttttctcctgtttttatttttatcactttagacttttaaaaaattgttttctctctttcctgaaatattgttacctttttgctgggggatgagagctaggaagcattcagcataaaggagatagctctgtgctgggcttctatcctcaaaggagagatgacatttctgccatttcaccgggcccaaaatgttctctgcagaattcaacaatcacagtggctctccctcccattctgactctccttgagtttcttgtccaataaagacaaagatcaagtcttataagttacttctgcctcccatggaatagtaaacacaggcttataaatggatccggaaactgctagaataatgtaatacctgattcttagaaccatttagtcctcatatgagaaattttatgttatgaactccatggtctgacatgcacacgtgcacacacacacacatttgcaggatgttggtacagctttccaagtcaccagttctacatattgagaaggaagcaaatgggaaatcttagccaaggccagtccctcagttgaatccctccagagtcattttgcaggacaaggactgtagaaaggcataatagaacacccataatgttgatactagaatctcttctgtattggggttatctaagaaggaatctggtcacattgattctccctccatcaaaatgaggatttcaagagaattctcttaattaatgaacagtcacctggagcactcttttcatatgcaggttccggatcccacctgagattctaacctagtagactggtgatgaactcaggaatctgtctggttaaacagttctttgagcagtgctgataacctgccagatttgggaaccactactgtatggaccagttttcttcaattccctgccctcacaaaaactaaggagatgatggctaggattaacagttggccttgataaggttggagctgttttctccaacttccctacaaaagacagagaactttcactttgtgatccttaaagtagattcctttaaagtagaaaatattttacatgtaacccaaatataagatgagaattactttaaaatgagacagagtagtaaaattccattaataaagtctgtggccttttaaatgttgcatatgcttttcagtctgacataagtatccctcttttgactcaacttcctttttctttgttgtttactattcagttaacattaattgagcacttgctctataccaggtgctctggtaggtatttttatataggtgatctcatttagtctccctagcaattctatgaggtgtaagcataatttccattctgcaagtgaggaaactgaggctaaggagttctttggagccaggtgcagtgactcatacctgtaatcccagcagtttgagaggctgaggcaggaggatcacttgatctcaggagtttgagaccagcctggaaaacataacaagacctcatctctactaaaacgcccccctaaaatattagccaggtgtggtggtgcacacctgtagtcccaactattcagggggctaaggcaggaggatcgcttgtgccctggaaattgaggctgcagtgagccctgatcctaccactgtactccaccctgggtgacagacaagattattttagtccctcttatctttgagccatgaatttcagctattccttctttcagatcctaaatttttgcttcctcttaacccatttgcttattagaccaatttgtgtaactgaaagcatacataatacaccaaattaagtccttgagtttgacaatatttgtactcagtgttgtagagtaacctttgaaatgtttgaaagttatgtccattgctgctttatggagtactgtttaaaaaaggctgttaggcctttttttttttttttttaagttctagggtacatgtgcacaatgtgcaggtttgttacatatgtatacatgcaccatgttggtgtgctgcacccattaacttgtcatttacattaggcatatctcctaatgctatcccttccccctccccctaccccacaacaggccctggtgtgtgatgtgaaatggggaaaggattccctatttaataaatggtgctgggaaaactggctagccttatgtagaaaactgaaactggatcccttccttacaccttatacaaaaattaattcaagatggattaaagacttaggtgttagacctaaaaccataaaaaccctagaagaaaacctaggcaataccattcaggacataggcatgggcaaggacttcacatctaaacaccaaaagcaatggcaacaaaagccaaaattgacaaatgggatctaattaaactaaagagcttctgcacagcaaaagaaactaccatcagagtgaacaggcaacctacagaatgggagaaaatttttgcaatctactcatctgacaaagggctaatatacagaatctacaaagaactcaaacaaatttacaagaaaaaaacaaccccatcaaaaagcaggcacaggatatgaacagatatttctcaaaagaagacatttatgcagccaaaagacacatgaaaaaatgctcatcatcactggccatcagagaaatgcaaatcaaaaccacaatgagataccatctcacaccagttagaatggcaatcattaaaaagtcaggaaacaacaggtgctggagaggatgtggagaaataggaacacttttacactgttggtgggactgtaaactagttcaaccattgtggaagtcagtgtggcgattcctcaaggatctagaactagaaataccatttgacccagcaatcccattactgggtatatacccaaagcattataaatcatgctgctataaaggcctttcttgtacataatattgaaattgcagtaaacatacaatggcttaatgtcatatttacttttggctaatcattcttgataaacaggctagcccatgatattcattataatgtcttacattatttttgtttaattaaatatgtggtagatgtgtaagcaatttttaagcagttttattctttgcaatggataagcaaattaagcatagtttttactttgtaatcctagagtagaaaaatttagtctttattattattgcatcttgaatgtagtcataaactaaaacacttaattgaaaagtgataaatatctaatttttttggtagcaaaataaatcttgcccagtattttagtttgttcaggctgctataacaaaatactttaaactgggtagtgtgtaaataacagaaatttgtttctcagagttctggagactgggaagtctaagatcaacatgtcagcagatttagtgtctggtaagggactgcttcctggtttatagatggccatcttcctgctttatcttccacatggcagaaggggtaagggagctttctggagtctcttttatttttatgtattttttttttatttttattttttgacatgagcttcactctgttacccgggctagagtgcggtggcatgatctcagctcactgcaacctccacctcctgggttcaagcaattctcctacctcagtctcccgagtcgctgggattacagctacgcaccaccatgcctggctaatttttgtatttttagtagtgatggggttttcctatgttggccaggctgatctcgaactcctgacctcaggtgatccacccaccttagcctcccaaagtgctgggattacagagccaccgcgcccagccctgcagtctctcttttgagggcactaatccccttcatgaggctccaccttcatgccctaattatttccccaaagcctcacctccaaatactatcacactggagattaggattccacatattaactttaggggaacacattcaatctatggcacctagttctccagaccatggtgctgtggtttgaatgtcccctccaaacgtatgttgagacttaattccccagtgcagccgtattgagaggtggggcctttaaagtgtgattggatcatgagggctctgctcttgtgactagattaatccattcatggagtaacggctaatggattaatgggtatcatgggagggggacttgtggctttataagaggagaaagagaggcctgagctagcacatttagccccctccccatgtgatgccctgcactgccttgggactctgcagagggtctccaccagcaagaacaccctcaccagatgcagcccaacctgggacttctaagcctccatatctggaagaaattcctttcttaaaataattacccagtttcaggtattctcttataagcagcagaaaatggactaggacacatgatttccaatgactgcaggacccaagttcacaatgcaagggcagttctggaaaaggctggcattcttcagtaggaaaggaaacattaagctgtgtgattttaccttgaaatccccgctattagttttgatagaattttctttggtcagaaatgtgtcattcacaaactaaaatttcctaaaaagataactgtggtgcttaaaaaaatagaaccagttgccaggagcagtggctcatgcctgtaatcccagcactttgggaggccaaggcgggtggatcaccagtcagacgttcaagagcagcctggccaagatggtgaaaccccgtctctactaaaaatacaaaaattagccaggcgcggtggcaggtgcctataatcccagctacttgggaggccgaggcaggagaatcacttgaacccgggcagcagaggttgcagtgagctgagatcacaccactgcactccagcctgggtgacagagtgagactccatcaaaaaaaaaaaaaaaaaaaaaggaccagttgtccttattcatctgcctcaattttgactcttctgttagatttgtccaaatgttggaccagtatttcagggaacttcctaatctctgactaatataatgtcagttactggattgtgaaaatcactcccagcatgttctacttgccccacttgaagaatatccactatttttaaaaaccctaacattaaaaatggtaagttggagacgatttgtgtctagaaatgatctttgcacatcaaagcatgttctttcaaatagaaattaccctattagatttaaaatatgaaatagttcacttaaagtcaccttttctttagcattagataagttaaacttgagatgggtttggtattaaattatattgttgctcactagtctcacagtgagattggagggaacatattttatacccaatttcggaagtttattgagtcataagagtaatccctgtttttggtcatacattgtatctagaacatagtcaaggtctcatctactaataaagctacaccccttcttctttttcagtgtaaattgagagatcatatatacaaataaactatagatgtatactgtaaaataatagttagaaagtgagtatccatataatggcttttcatatcaagaaatggtcattgccaacagcccagaagtcccaatataccctctggaactaaaaactgtcctgactttgggtataactgtcatcgtcttcataattttaccatctgcgtgtatatttctaaacaatgtggtttccaattctgaccttttcataaatgaaaccatgcactatattttcctttgcaactttcttcttccagtcaacattttgttgatgagagccatttatgttgttagacaacatttgttcctgtccactgatgtattagtattacattacataaatagttcacagtttctccattctattggtggacatctagattatttcaaattttgagctactaaaaaaattccccaaaataaatgaaacaaaacttgacagaactgaaaagaagtagagacaattcaaaaataatagttggagactaatgccccagtagtagaacaactagatagaaagacagcaagaatataggtttaaacagcactatcaaccaacatgatctaactaacatctatagagcattctacccaatggcagcagaatacatattcttttcaagtacacatggaacactctccaggatagaccatgtgctgggtcacaaaacaagtctcagatttgaaaggattgaaatcaaacagatatgtttattgaccacaacataattaaattagaaataaacaaaagaaaggtatttggaaaagcttctaatatttggaaattaagcagcatacttttaataggtcataaggaaaatttaaagacagtttgaactaaatgaaaatataaatacagcatatcaaaatttgtgagatgcggctcaagtggtgcttacaggaaaatttataactttaaatcctacattagaataaaagaaaacatcagataatctaagcttctaccttaagaaactaaaaagaaaagcaaattaaacctcaaataagcaaaagggcagaaatcataaagatcagagcacaaatcaatgaagagaaaacaatagataatatcagtgaaactaaaagctgattctttgaaaagatcaataaaatggataagactttacctagaatgagcaagaaaaaaagaagagacacagattaccaaagtgaagaatgaaaaaagagcaccgttattgaccctgtagaaattaaatataaaggaatacaatattagaaacaaattgaaatgaacaaattaaacattgtagatgaaatgagcaattcttagaaatatacaaattatcaaaactgacttaaaaagaaatattaaaaactgaatagacctatcactattttttaaatgaattagtaattaaaatcttcccataaagaagaacacaggctcatatgtcttcactggtaaatagtttttgcaaagaaataatgtgaatcctacacagactctttcagaaactagagtaagaaaaaggaatgctacccagctcattcagggaggccagtatgaccttgataacaaaatcagacagagacatcacaggaaaagaacagaccagtatctctcatgaacagagacacaaaaaaatcctttacaaaatattagcaaactgacaccagcagtgtacagaaaggattgtacaccataaccaagtcagatttatcccaggaatacaaaattagtttaatatccaaaactgaaatagtataatatgccatattagtagactaaaggacaaaccacatgatcattttaatagaccaagaatcaacaaaccacaacccacaggccaaatcctgcctgccacctatgtttgtaagtacagttttcttggaacacagctacacccacttatttatgtattgtctgtgtctcctttcacacgacagtagcagagtcaagtagttgtgacaaagatcatattggctcacaaagcctaaaatgtttattactgggccctttatagaaaatgtttgctgacccccacaatacacacagacaaaacctaacatctgttcatgataaaaattctcacacaactaggaatataaggtaaattcctcacctgacaatgggcacttggaaaaaacctacggctaacgtcacacataatgatgaaagactaaattctttttccactgatcagggacaaagcaagaatgtcggctcccagcacatgtattcagcattgtgcttgaggccctagaagagcatacaacaagataaagaaatcaaatgtatacacattaaaaaatgaataagtaaaactgtctgtatttggccaatcatgccacttcctgtctttctttgaaattctacccatgtttccaaaagcattgccaaaaccctctctccaagttcttctttaccattctgtactgtttttatctcctgctaccttgtgtattaatatgtatgtgtatactttaatctcatttcatttttaagttaattgttgtgttttctatgtttatgtcaccctatagcatattgacataatacactaccttgcacagaatagctacttgttaaatatttctgaataaaataatgcagtgtggttgaaagttggcttgggaattaagtttttgcttctaggtatcaagaccctaccagataatacaccctacagaaaacaactagaaagtctgaacatataatatgaaacacaactacttgaagatactggagaatgaatagaagcaaaccatttcaggctgtttatgctcatttagaggagaggaaacaggaagctatatacatacatttctatttccatggcttttagcctgggaccaagtacagtccatgtagttcgtggcatggtggcaagcacctcacatggaagactcttgatatttctggcctgggaaatcacagaagagaaactgggaaagcatgaatgctgaagagagtagaagaatcctagaagggaaagagctggaagggaattcccaaactgcctgtctacatctctgaatcatagcagctcagctagaaaccaaaactctgaactaagaccagctctgaagataccgaagagtgagcagatgcagagactctcatgaagagggtgcattcttcacttggaggatggaaaataacaaacctacttcctgacactttcagccttgggctgactgcagtgacagcatcacactgcacacagagcagaggtggggcacatgtggaaaagtagcagagcctttctggcctgaaaaccagaaaagagaagttgagaatccataaactctgaaaatagtggaggaatcccagaagagaaagagtcagagaaaggaatccttaaactctgccagtccacatctttgactaaaccttgaaccacacatctgcagaacaaactttaaacagcctggctaaaaacaaaagatcaaaatacagagttttcagttctagcccagacaagaatctctacagctcccctctcccctctcccctctcccctctcccctctcccctctcccctctccctatcggtctccctctccctctctttccacggtctccctctgatgccgagccaaagctggactgtactgctgccatctcggctcacggcgacctccctgcctgattctcctgcctcagcctgctgagtgcctgcgattgcaggcacgcgccaccacgcctgactggttttcgtacttttttggtggagacggggtttcgctgtgttggccgggctggtctccagctcctaaccatgagtgatccgccagcctcggcctcccgaggtgccgggattgcagacggagtctggttcactcagtgctcaatggtgcccaggctggagtgcagtggcgtgatctcagctcgctacaacctccatctcccagccgcctgccttggcctcccaaagtgccgagattgcagcctctgcccggccgccaccccgtctgggaagtgaggagcgtctctgcctggccgcccatcgtctgggacgtgaggagcccctctgcctggctgcccagtctggaaagtgaggagcgtctctgcccggccgccatcccatctaggaagtgaggagcacctcttccccgcagccatcccatctgggaagtgaggagcgtctctgctcggccgcccatcctctgagatgtggggagcgcctctgcccggccgccaccccgtctgggaggtgaggagcgtctctgcccagccgccccgtctgagaagtgaggagaccctccgcccggcatccgccccgtctgagaagtgaggagcccctccgcccggagccgccccgtctgagaagtgaggagcccctctgcccggcagccaccccgtctgggaagtgaggagcgtctccgcccggcagccgccccgtccgggagggaggtggggggggtcagccccctgcccggccagccgccccgtccaggagggaggtgggggggtcagcccccgcccggccagccgccccgtccgggaggtgaggggcgcctctgcccggccgcccctactgggaagtgaggagcccctctgcccggccagccgccccgtccgggaggtgaggggcgcctctgcccagccgcccctactgggaagtgaggagcccctctgccgggccagccaccccgtccgggagggaggtggggggctcagcccctcgcccggccagccaccccgtccgggagggagttggggggggtcagccccccgcccggccagccaccccgtccgggaggtgaggggcgcctctgccccgccgcccctactgggaagtgaggagcccctctgcccggccagccgccccgtccgagagggaggttggggggtcagccccccacccggccagacgccccgtccgggagggaggtgggggggtcagccccccgcccggccagccgccccgtccgggaggtgaggggcgcctctgcccggccacccctactaggaagtgaggcacccctctgcccagccagccgccccgtccgggaggtgaggggcgcctctgcccggccgcccctactgggaagtgaggatcccctctgcccggccaccaccccgtctgggaggtgtacccaacagctcattgagaacgggccgggatgacaatggcggttttgtggaatagaaagggggggaaggtggggaaaagattgagaaatcggatggttgccgtgtttgtgtagaaagaagtagacatgggagacttttcattttgttctgtactaagataaattcttctgccttgggatcctgttgatcggtgaccttacccccaaccctgtgctctctgaaacatgtgctgtgtccactcagggttaaatggattaagggcggtgcaagatgtgctttgttaaacagatgcttgaaggcagcatgctcgttaagagtcatcaccactccctaatctcaagtacccagggacacaaacactgcggaaggccgcagggtcctctgcctaggaaaaccagagacctttgttcacttgtttatctgcccaccttccctccactattgtcctatgaccctgccaaatccccctctgcgagaaactcccaagaatgatcaataaaaaaaataaaaataaaaaaaaaaaaaaagaatctctacaatgtaacattaatattattcaggatacaacccaaaatgtcccgacatccacagaatcaagaaaatggaacacattttctgcacacagcaatcaagttttctaccccaagacgaaccagatgttagaaccaacaaagattttgaagtaactactatggctttcctcattttttttctttgcatgaaacatgtttttaatgcatgaacattccagcagagaaaggagatgtctcagccgagaaatagaaacaattaaaaagggccaaatggaaaaaagacagacagttgcagatatgagatgctgacaccaaacagaataaacacaaagaatctcatgtcaaggcattgtagcatcaaagctgttgaaagccaatgacaaaaaccaagagaaaaacaacaaagtataacatagtaccaaattcccttatgcgggaacaactcaattaaccttgcacttctcattagaagtcagagagtctcaaagagaatggaacagtgctaaaggaagttcttcaggctgagcaaaaatgatgccggatggaaactcaggctttcagagaggaaggaaaaatatttacaagaagtagtaaatatctaagtaaatatataacattcatatttatattttccattctctttgccttcttcccttcctccctttcctcccttctttctctttaatttttaaataaactaaaattcctaaatgacatggtggcaagcacctcacatgggaaactcttgatatttctgacctagaaaagcacaggagagaagctgggaaagcataaatgctgaagagagtagaagaatcccagaagggaaagagccggaagggaataaccaaaattatcacattggtttttaggatttataatctatgtagatgtatatataacaactatagtatataggagaggagaggagggatatggccctgtatggttgtgacagttgtatagtttacatgaagtagtatatatatatatatattttaatttttgtgggtgcataggtatatttatggggtacatgagatgttttgatacaggcatgcaacgtgaaataagcacatcatggagaatggggtatccatcccctcaagcatttatcctttgagttacagacaatccagttattctctaagttattttaaaatatgcaattcagtttttactgactatggtcaccctaagtaatatattattatctgtaagttgactgagaaaagttaagagtgtatattgtcatctctagggcaaccactgtaaaagtaataaaaaaatgaatagctcaaaagccaacagaaaaattagaattcttaaaaacattcaaataattttttccccaaagcaggaaaggaggaacaaaacaagagaggatttgagtagaaagcaaaatataatattggcagatgcaaacctaaccatatcaataattacatggaatgttaatggaccaaacactcattaaaaagcaagaattgtcagaatggataaaataagacccaactatatactgtctgcaaaggatatgctttaactataaaaatacaggttgaaagcaaatcagaaaaagaggtaccatgcaaacagtaagcataacatggctttactaatgtcacataatacagatttcaaaacaaaaccaaaggtgaatgaggatacttcataatgatcacagggacaattcaagaggaagacataacaggcacaaatgtgcatgtgccaatagcaaagcttcaatatcatgaaacaaaaagctgacagacaactccactgtgttggagacttaaccctccctcagcaactggtagaacgtctagaccagaaaaattcactgaagacatagaaaatctgaaaaagactatcaactacctcaccttgattgatattcccagaacatttcactggacagtggcagaaattcacattattttcgaatgtatataacacccttaccaagataaatcctattttgagccatagaacagatctcaataagtttaaaaaattagaattgtcaaagttaaattgatgaaatcaataaaagctagaaaaggcaaaactgagagagaaagcagatctgtggcttccttgggcccagggggacagcacagaaaatcatgtgcaaaggcacaggaaggggctttctactctgcatcttaattgtggtgtggtcacacaattgtatacaaacgacgaaatttatgaaattgaacacttaaaattagtaaattttatcttgtgatcatctcaagaagcaaaaaataggggaacagtcagtttggtcattttcatctaacaaatgccagagttcaattttaaattgtaattggagaccagaaaaacattgccaaaagggaaaaaagtcctcctgtgaagctcccgtgttgtgcagggcaccatatgtttcaccacctgagacaagagctaatttatggttagagcgtttaaagagtccaggttttttggaaaaaggaactatatacgagttaagcttctgaggaagacttaagagcattctttctccacattccttctcgcacagcccagaactagtcttgtaacagaagaaaagctatgaaagaatcaccctgaaaaaccaggcttctttatgtgcaatgagaagatttttcatctaaatatattatctgttaaaaagtgatcagggctgacagcagcagtctgttctgtggcatccacagcctctctatggtgttcccacggagaattctggtaataacagataccatatttttgcagtaccttcaagggttgttttaaagcagaatgtacaattcacctcttcccaggtgtcatcaggatgtgaacatgcagcactttatactgttattacattttacatgataactctttatataaaacataaaatggctccagaaaaatgattttatatggtacctactctgaaaacctaaacaaaatggtgcttgttattacattggtgttgtgaattacttgaactattacgatagcatgtttcactaaaacatatttcagtagtttacttttggcataatatctgcagcatggagaataagtgtcatctcaaagtagaaaggcatggcatttttcttaatgtgtctttcagactcaaagtttaaaacatcataatatttttcctgtgattgctactatttttatattcatatatctctacacacacatacacatacagagacacacagatacatacagagaaagattattccccaaaatgaaaatatttactttgagcaataaaattaagggtgagttggttggttgatccgttttgctttgcttttttgaaatttactttaatgttgttatactgcctgtacagtaacagggtgcccctgctaacacatttctgacattgccctatcaaaatggaggataaacattgccacagccccaatgaaagaaaaaatgtgttatcaagcttttaagtgtatggggtttaaactcttctcatgttacatcagatctttactgtaaactagccagaatatttcccagcagaaaatagtaagtgtgtcttcaactgcaaagagcacttcataaaactcgtttcactacaaaacagagtaaacagtcttttgatcccttctttttccccacctcaaaagttaaactgccattccttgtttccaagactcacagtagtaaatgttttgaattttccgtgttggaaaaattctgacatggcattatctactacccccaccatcaaaatgaagatgggactatgtgtctatagttttcctcgtaccagtggccattttcccaagcaaggatccagaaatgtgtattttcctcttgactctgccatcgattccctgtttatccttcactgaatccttctttccctacatttccttggctccataatggacatattggctcactttaattaaagattcctgagtgaccctgatccttggatgaaaatctgaagagagggataaggagtaatgggatgggagtaggggagtatcccacagcagtattcaggaaacaaaccttcagcattcaggctttgtctgtccccaaccaagccagcacaacctcctcctcaggggctgcacactcggccctcaaatgggatggtattgagactcatgttgatggacagaaaccaagaaggaagagaaagcaactgaaagagggaatgtccctggcttctcatcatcataagtacttgaggtccttagggttatgggtccttactgattgtctagctgtaaaatctatgctgttcgtctctgttcagcaaggagacacaggtgaaagctaggtttcctggcctcctgattctggggttgatgagcatcagaggagacacccagcctgtctgtctcccccattgcttatcagcagccccttcctcaggactctgtgagtccattgcatccagccttttccatagtagtctcaacattagtgaacttttaagccttctctgtcttctgtgcaactcctacccacatctggcttctgaatttgagacgatctgaaagcaaccacattcaaaagaaaacagaaaaacattttagttctcttggaacttactgtataagaaactcatgtgctttgcggaatatttacaagtaacggttcttcagattaagtagaggtctcagctttgcttttggccgttaaactcggtagtcatttgtagctctgttctacaaagcactgatgagtatcctctaaataactcagctttcatgttatgaagcagactaattctcataccacaggtaatgagccctagttttgaatcaaacgttttgatttttccagtttggcttattttctgaatttaaaagtaccatgcacaattatatgtagacaattaaagtttgaaatggttcctaagcacaatacagttatctctctgtatccatgggagattggttccaggaccccacccccaaaacacccgccatagataccaaaatccacagatgctcaagtccataatataaaatagtgtatttgtatataacctgtgtacatcctcctgtatactttaaatcatctctagattacttacaatacctaatataatgtaaatgccatataagtagttgttatactgtatcatttagggataatggcaagaaaaaacagtctgtaatgttcagtgcagatgcaactatccttgttttttcctcagaatattttaaatccatggttggttgaatccagggatgcgaaacctatggatacagagagccaactgtgtaaatttagttttgctttttatttataagctgtggaggccaaaagaacctagctgttaaagtggtcatctttttcaattcatatgactgatcagaatcacaactcggatagttttaaaataagctgggagactccctttcccttccatcttaacgttttgataccaaattattttaccttaataaagcgagtgtaacactgcctccctatagtgaatgcacagacttctctacttatcctgggcctggacacaacccaactcagtgtcaccaagaatccaaaattgaagtcaaaaaaagaatgtgtcttgtggttccaaaaccatggaagaagaaaaaatggattaaatggttaaagaggaagcttagggctcattggcattcccccattccttgttttagacgtggttattatcggtgggtgaaattagcctcagcctctctgtagacctccagcatgtccttgttgctgctgtgacgtgggtttgcagggtgaatttaatcaactccaggcttccttactgccaggccaaggctgccagcctcttgaaagctcactcgtttcagattttgtttttttgggttttctaattttttctaattgagggcctgaagccattatttaagacttttccaaacttctcttgccttcaagtgttcatttgactattttatgggggtggggggaggtggtattgtttgtgttttctaagcaaaccaaaattacatattttttaatctgtcaagttaacctttgacaaaagtttaccttaattcagtaaacatatttgtactttggccaattctgaattaacttgaaaagtgttaagatatttttaaatttttaggcataaatatagcacatatagagttatgagaattgccttttagtttacttaaacataaagatactcatttcaagtttaaaatgtaaatgatcttgtgacgaatgaggctattcacatttcagatgaacttgtttcaatactttgaggcactttctatttgtcataacttccctgagattgagtcactatgttttactcttatttatccacgtatgtgttcatttttatacattacattttcccaactctaaatcaaaactgaatgccaaggatattttgtttttggttggacgaggggagttacatttaaatgagaagactattaaacctgctcttctgaaataattttaataggcatatgtttccagccctgcaggtttaagagcctagtctaatggaaggggcacacgatagcaatgtcctttcttaaagggatatcacatgtttgtgaagccctatcagttgtgcttcagcaagggctctaaatggagtctggcagctctcctatttgcacggcgctgtctgtctcagcaatgataagcaaagacaggctgactccttcaaggagcctttcataaagtctcagctctcaaacgttccgaaactcactggtggactttcccctgtggaccattcatttatcaggaaatgaaattggttacagggtttctcacgttgccaaacctcactgacgaaatctggtttcttccaaagttcaggaaaagcatttactctattttgctgttcactacttcttgtctttgtgggaaccacagtcaatacaagggtttgagaactccacaggggaaaggttggagtgggaggtggccagggagtgagtctgggggctactttcatagatatcaaatcccatcccttttgaatgggattttttttttatgttggcattttcgtctttcaaactacagtgtcagtttcacaggagtgattttttccacttcaaaaatgaaatcctttaaacatgacacgaatcaccttattggcagcatagctttgtaacttagaccagagatcattgtttaaacttcgtgaaactagaaggaacaaaaataaagagaaacatgtagttgtatggcacagagaatgtttggataagtgaaggttaaattattacaaagtatgtaatctagttcatatgtttaaggaatggaactaggctaaattatctaaaatattctgacgtactgaatcatttcattttgtaaaacaaaatctgactagcagggcattctgttgtaggccagtctgttgagtgcagtgtgcaacctcctgtgtttggaattagcaggcccaggggtaaggcgcagcgtgcatgtggcagttattatggctgtggaagtggttgctagctaattgatagcagtagcagtagaaacaaccttatttaattttcaatagtccctatgacaagacgctatacatgggatcctttgtagtcttaccattattgtcctttctctccctgccattaaatatatggtagttaatatatacacttgatgatattaagaaatgaattccttttactcttttttccccctttggagcggcttcacatttgacttctaaccctgattattttaggcccccaagtaagtagtgatttactatcagtgagcctgttacccttgactgttgtagctccgatttgctaaaaatgtacttgtggtcacaaagccacctcttagcctatgctggctggtggttttgctcataatctgaaccccaaagagacacactggttccataaagggaaaatgaatgaatcgtcttctctgttcatcacggggagataagcttttgtgaacttgaattgcctttagagcattgtgtccgtggtttcaattgtatcacagaatgttacacagactgaagttaagtggttactttttgtcaggggttatcttatttttctccattcagtttaacatgtgtactgcaaaagacagtatttttggaaatgaaggcatagtctttcatttaaacatgcatcagagggatttcactaatgaaagcattcaaatcatgtgcctagttcttgtttctagcagcctctgccattaaataaatatcagtcttatcaaattcatgcattcaacatttttcctgttgatacaggcatgaaaaataaaagcaggtaggcactataaaagatttgccttcatctttggtgatctgtatcccagccctaacctacaggaactgaaaatgaaaaatcagtgattatttttgtcctttataaatggtctgcacattccaccatacagcctctcattgctaacagtccctattgaagagaaaacaccaaacccaatattgagagtttttcaaatcagggcacaatggggtataaggaaccatgtggactcttgatcattatatttatttatggtgttctcacagtctttaggcctctgagtctttgaataaatatctccaacatccagcggctaacattccttttcctacaaagctactatttgcaatagagattttcttgtctttcatttatttgttcaactagtattgattgagcaactcctgcctgcacagcactctgctagtggttgtcccttaaagaaccttactgtttaggggggcacagtttctaaagtagcattcaaagaaacggcttctctactcccttccttttcaaatgtgaggaacttaagaaaattagagaacacaaatgggcaaagggggcttgggaggcaaaagaagactgttcacactcagaggactttgagctgcagtggtttccttgagtgtgaaatgaagaatggctgtggacagaatgcagattctgaagcacataagtggagaggcaggtgggatgctggagggctgagagtgagtccccagtcctgcagtctggggcaagttatttcaccttcactgtgcatcagtttctcacctcaaggacaggtctaactcatcaccttacctacatcctggaatagttggagaaatcaaaagaaacaatgcacgtaaactccctagcacaaagcaagctctcagtaactgttagccaatgttagtttctcacatatctatcaacctcacttttccagaacaaagccaaaaactagagttgtagattctgaacaatcaaaatggatggctcggagctcttgtcttgtactttattaatcagggagcctcttgctcacagccatactctttgcttgatacaagttttgtttgtttatttgtctgtttttgagacagagtctcgctctgttgcccaggcgggagtgctgtggcgcgatcttggctcaccacaacctgcaccccccgggttcaggcaattctcctgcctcagcctcccgagtagctgggattacgggcatgcgccaccacacccagctaatttttgtatttttagtagagatggggtttcaccatgttggtcaggccggtctcaaactcctgacctcatgatccacctgccttggcctcccaaagtgctgggattacaggcgtgagccaccatgcctggcccaatacacagttttaataagcttagccatctggttcccaagtccataatagactagaagccacaacttaaaagaactgctacaggttagtacactaacagttatgaaaatcaagggccacttgttctgattagcaagggagcaaaacaacacacatgagtcttacttttataagtatatgtgttgttttataaactaaacaacacacaagccttacttttcagtatcttataagaacttttacatgctactcatgaaaatataccaaaaagagttgtgagtctgtggcagtcatgaccctgaagaaaagttgggatgatacaggacatagagctggtatcatctctacccttgagaaacacaaagccctgtctttgagaatagcgagtgggtgacctaagcccaaagaaggctcaaggtgccagtctgaactttcagaatagataaattgctgaatgattttctttagcaggttagttttctttttattttactttgggagggatcatagcaagattcttgtaaatgctgactttaatgtatgatttggtgtataacaatttagtttattcactattttccatgaacacgttagtatctctgtcaagactaagttgtctaatttaactcacgcatcatcccatctatgtaggtaattattttactaatgtgttgtcaaatgagggtaaactaggctaactccaaagatcccttcttccataatcaatttattatacttcttttgttttgcctgtgtctcctcaatatacattctattctcacaataagcaaaaactgaaaacttgacattgtaaactttctcctggttccagtgtttgtatttatgaaaaaacatcaattccatgcagatgtgttcatgtgaactatttagaattgaccctgattccgaatcccataagtgacactttccagtagaataaaaaagatggcttggaatgtaatcacttctggagaggaaataggagaagctgtttccttcttttagatttccactcttttattctgctgagagagggcatagaaaaagggaaaaaaaggaatttctcctcatcctcagcatatgagagctgtatgtggctttttaagtttttaaaaacgcagccaagtgtcagggtacccagttcatttttggagttgttctggcttgtcatatactcctcacctccagcagtccagcctaacaaaagctgttacaatgacttaaaaacaatattctctggagctcctttcatttctaaggagcagcatcaaactgtgccccttctccattgtaagccttaggatttgtgggaaatgcttttgtttaaagaaaggtatgaaggaaccagtcatgaatcttctgttcctaaggaagtggaccaaaaaatatcctttctctcagcattagttgttagaatggagaaagaagagatacttgagaaaccctcttttcaacccccttattttggggaaatgagaattgcctcatccaaggtcaccaggctggtgggggcagatccaggctcctatcctggacttcctgactgcacctggtcatgtccctttgtactacacatggcttttctctgcattcaagggacactgtaactgttaatatcagtccacagtcccctctcaaagcagcctcaaaaaagcttgaaagtccaactattactagtcattgcccctgtgctattctttgtgtagaaggatgatgccatgagttttggcttgatgtttatgatgtatttatgttaactcaaattctctttcattgacctatcctctttgtgactaatgaaacgcctttgcaaaagggccagttttggaggggtgggtgttctgtcagcagtaacatctcagatctgtttatgccttggagggaccatgtcctcaggctagatctcgggggctcagtattctagtaccataaatatttttagaactgtctttttgagttctactttcatgcacatttgtgactaaatttaatatttttaactggcatactttattttgttatgtgttatttaactgcaagttgatctttaactggccatttgagaggcagattcttctgctctgcccctgcatgtggcatggacaattgtttcaggataacgttgatccctcccagttctctgaacatggcatgcacgctcccagcctcagcctgtgcttgtttcccacgagggccagcgaaggccagagattctccccaagattttcacacatcaccccactccttccctactaaacttccgtaacactcacatcaccccactccttctcctaccgaacttccatagtgctcacatcaccccactccttcctctactgaacctccataacacatcaccccactccttcctctactgaacctccataacactgacatcaccacactccttcccctactgaacctccataacaacactcacatcaccccactccttcccctactgaacctccataacacatcaccccactccttcccctactgaacctctataacacatcaccccactccttcctctactgaacctccataacacatcaccccactccttcctctactgaacctccatagtgcccacatcaccccactccttccccaactgaacctccatagtgctcacatcaccccactccttccctactgaacctccataacacatcaccccactccttcccctactgaacctccacaacatatcaccccactccttcccctactgaacctccataacactcacatcaccctactccttcccctactgaacctccataacactcacatcaccctaccccttcccctactgaacctccataacaatactcacatcaccccactccttcccctactgaacctccataacactcacatcaccccactccttcccctactgaatctccataacactcacatcaccctactccttcccctactgaacctccataacacatcaccccactccttcccctactgaacctccataacactcacatcaccccactccttcccctactgaacctccatagtgctcacatcaccccactccttcccctactgaacctccataacaatcacatcaccccactccttcccctactgaacctccatagtgttcacatcaccccactccttcccctactgaacctctatgacactcacatcaccccactccttcccctactgaacctccatagtgctcacatcaccccactccttcccctactgaacctcaataacatcaccccactccttcctctactgaacctccataacactcacatcaccccactccttcccctactaaacctccataaccctcacatcaccctactccttcccctactgaacctccataacactcacatcaccctactccttcccctactgaacctccataacacatcaccccactccttcccctactgaatctccataacacatcaccccactccttcctctactgaacctccatagtgctcacatcaccccattccttcccctactgaacctccataacatgtcaccccactccttcctctactgaacctgcatagtgctcacatcaccccactccttcctctactgaacctccatagtgctcacatcaccccactccttcccctactgaacctccataacactcacatcaccccactccttcctctactgaacttccatagtgctcattatctacaccatttattagctgtttagtatatgctgcttctggtaagatcttaactatatttcctttttccaaactcggttgtaacacctgatgtcaaggacctgctatctgcctttttatatccccagtaatcagcctgggaccctgtatacaatagacacacactgcatgtatcttcattgtgatgggatgaagaggtatgagtggccaaagtacaggaggctatgttggccaagatgcaagtatgatagccaccttgtaagctgtaacaatatccagggaaggtttgatatagggcaagatcagggataagaaaagcagtaaagaaggtatgatgtggtcatgaaaaccttaaaaaaaaaaagaatccaaattgtacagatactttggaaaccagtttggcttatctgctaaagtcgaacagatgtatatgcatactctctcccactcctaggtaagcatctaacctaaatgcctgcccttgcacacgaggagatgtgtaagaatgttcatagcacaattgttcataacagtccaaccctggaaacaacccagtgtccatcagtggtagaattaattaataagttgtggtacattcaggcaacagaatacagcaatgaccgtgaatgaatcacagccaaacccaacatgtttcaatctcacatgcataatggtaagtgaaagaatccaaatacagaaggttatacactgtgtaattccattaacataaaattcacagatagaactcgccgagagggctatggaatgcaggtataggtggtaaaagtaagtataagaaagagcagggagcgcctaccacaaaaatcagggtggtgatggccagggagatgggagagagttccctgatcaggctggagcagtaattccataagtgttcaccttctgctataggttggtgcaaaagtaatcgtggtttttgctatatggcaaaaaacgcgattacttttgcaccaaccttatttagttgttacacttttacacttgggaacttttcggtatgcatattatatttcacaaaataaaagttgtttttataaagtggggaggagcggtccatgaaggctcctttacttaaaaagtgaacaaactatggtaagtgatagaaatgttaaagggattccaatgaaggtaaaaatcacctatggaaaattattctccctctttccatttgcatataaaaatcaaatgatttcacccgttttcgctctcctaagatgtgatctatgcccctcactaaaaggactagaaagagatacatcaaagtatttcatagttgttatatgtttggattgtggaactaattttagtgataattttataagccctgtttttaattttttttcagtgaataatatatttgattttactacaagcatgtagttaaaaaaaaaaattgaggccgggtgcagtggctcatgcctgtaatcccagcattttgggaggccaaggtgggcagatcacctgaggtcaggagtttgagaccagcttgaccaatatggagaaaccctgtctctactaaaaatacaaaattagccaggcatggtggtgcatccctgtaatcccagctactcgggagggtgaggcaggagaattgcttgaacacaggaggcggaggttgcggtgagccaagatcgcaccattgcacttcagcctgggcaacaagagcgaaattccgtctcaaaaagaaaaaaattaactgtttcactagaaaaaggaaaacatggcctaggcaatatgagttagaggaagttgttgtcatgaatgtatggacttggagttagcagagttactggttttaaagcaaataggaatgggaaaatagtttatatccctgatttctctaaaatcaagacccaagccttctgtgggtattttagtgacgtgcagtgcaaagaagcccaagccaagcttgtgatttgtctgtgagcacttgcagccaatttgtattttttagttactctctctgatctactaatgaagtggctaaacaagtaacttttaagcataacttaaacagttcaatgctttcagaaatgagtgtagctaatttaaatcatgtaagtaagtaaaaactttgagaaaacaatttgttaatagcttagcaacccttggggatagaacatctgtgtttttaagagacaatgtttagtcatgaagtgactataaattcatactagatacattatgaacaacaaagaggttgaattccaaaacagtatttgaaagtaaagagagaaactacaattttgaacatggtaaaaattaaacctaaatttattttagttgcagatttagaagtgtgaaaaggaaaaatatatacgtattttgaacatgctatcccagtgatttattaatagagcttaatacactcttgctggagatttcaaatgcctgctagcctctccacatataagtgcaaaggctaaaacttcccttgcatcagtctagctagttttgtgttatttttagttttcaagtagaatttaatcaaatagatcatagagcggccctcagaaagtgaatgggaaatttcttactgttaacagtttctttagggagtatgaagtcatagaccctggtgtggagagcttcacagaagtggatctattttcagaattatgtttgatgtgaatttttgcacgtttacttcaaaggcattttcattataagtgacaaatgacttctgaggaggatagaataaaaagattagcttaaaataattgaaatctgagaagttaattttgttgaccaacgaataggtttatgaagcatcccattttgaaatcagaaaatttatatttccaaactcgaatctgcctaaaaatgctacttttccaggcatggcagttgttctgattagattttgtataatgtacatgattagactatcagtttcatgtaggattctatataggtttataaattgtaaactctcagtatataataaattaaaaataagaaggctagtccttttgggagtgactggttctactgtctcccttctaaaagtaaagttattttcattgtttttgcatacatgactgtattcagattttttcccaatgtctaaagtgcttcttccctacccaaactcacccctttctcttagggtttagaaattattaccttcagccaggcaccgtggctcacacctgtaattccagcactttggaaggccaagtcaggtggatcacttgaggccaggcgttcaagaccagcctggtcaacatggcagaaccgtgtctctacaaaaaatacaaaaaagttaaccaggcgtagtggcaggtgcctgtaatcccagctacttgggaggctgagatgggagaatcgcttcaacccaggaagcggaggctgcagtgagccaagatggcaccactgcactccatcctgggcgacaagagctaaactctgtctaaaaaaaaaaaaaaaaaaaaaaaagagagagaaagaaagaaattactaccttctcagcaaagcctttccaaccacttagcagcccagctattagagcacttcatattttgaattatcaccttgttgtatggttgtggctgtcccattagagaacatggtccccccaacagtgactgtcctaaaccacatttagtttcttagtcctgtaacagtgtttttcatgtatatatttctttagttctgttcatatatctatttacaaaatataacttatttcccaaggtttttagtaagagggaaattctttaggcatggatttaaaaaaaaaaaaaaaaagaaaagaaatctggcttttctcttttgattaattcctaatcttgcggtttcactcatccttctcatgtggtttctccctggacagacctgtgtcaggtgtgggaaattgggcagagaatgtaataatctcagtggagggttctgtagcagttgttttttaacttgctgaatatgtgctttttctcttatttgttcctttgtcctaaaaataggtgtgctttagtgaaagttccaattagtagggttccatttcctgtagattttgctacactggaagtgagaggtggctaaaaaccgatcatggcaaaatattccagacacagaaagctcctgcacagggagttggttgccttctgcccacagattaaggggtattgcctcattggctttccaggtggattataatctccttcccatcacgacatccatttccaccctcattttcaaaggtggaaaggaaacaggatgaggaagaatccctggggtgaaatttgaatgcacacttctgaaggggagcgactttttctaaactttgtaaagagggtgacccctcactgaagtcagtttttctaagctggaaccgttagccctagtgtgttccaaagactcctatttcctttccaaataattcaggagtcaggtggaggagaacaaatggcaaacagcatggccacccgtgtgtgttctgtgcatggcagtcagggctgggcactgtgccgttggtgcaaagcacctggagtctagtccactttaactcttgtctcgggaatcttaagggctcgtggttttccctgaaacctgtgggaggaagcttgctggcttcacatttatggcaggaggaccagaagagtccatcagtggctgtatttgcaggcctcggagatcccacagtcaaggcctggggactgactaggtcatagtcagcaggtcctgagctgggctagataagagtgtgcttcctagactgtgatcagaaagttaatcgttggtgacagtgagtctgcccttgttcctaagccattgttttagttttgtaagatttatagggctgacaatcagattaaaatgtatagaataagtaaaacctccttccttcagaaatgtgtattgggactttctcccagtctctctctccccgttttctaacctttgaagataaaggcaggagaattataattctgacaagccttccagacagcttgcttaatctgggctatgaggctatcaggcctggaggcttgtctctgcagctactgctaaactgaacatccaggcaccatgaggtcagctgcacagagaccctttcccagaggcaaactggctcaaagagagaccgtatcagaaaaataaagacttattaggatggagccagatggaggatggaaacagaattttatttgtgtgctcttttgtttctagggaaaaacaaaagcaacacaggtcactggactctaaacatatgaagtttgactatttacagaggaagctcttggattcatttctagatctcttccttcccagccctgatttccttccctttctggggagaggcagctgtgaagagctgccaagtctctctgcccactcaccctggtggcactgccagctctcctctgttcccactgtcatctttgggtcctggccctcagcccccatcgcctagaccctgcactagtcccccagctgctcccctccaagggctgcttccctcccatccagagggaccacattgtttcccaagtagtctcccaagagcacgctgaggtcctgggcacagctttgctcaggtgcgtggagtggccccactttgtatgcagaaaagtctaggctcagtctcagcagatctccataaacctgccttccaagctattttcacattccccctcttattctcaaacacaccggctggtccgtgggcacccttgtgcttttctgtctccctgtctgtgcttctattattcctctgcctgggatgcccttccccccacctccacatgcccaaatcctaccctttgtttacagaccacctaggtgccttctcctccttgaagcctttcttgatgcttccagtttaatttctcccttccctggatccccacagattacacttatttgcacacttcagatgatattatcacctcctatcttgtctgatagttatttttgtacatgttttatctccatgtctagattatgaacaccatggttcggaggcgctgcctctactttttggtatcttctgtggcagtggtttccattgagaagccattgagatttttttaagcacagagtaacatgatcaggtttttattatggacttttttgttcatgcccccctcactacccaggaactgctcagaaagggatggttcaaatctttttctcagccaggcttctgaacaatttccctgactaggcagtgccttacacttctctcctctccatcaggaccaccccaggtgaactatcttgccagcatcccctgactgtacttttcacggtctctctctctctccctccttctccctctccctctctccccctctctctctctctctccctccttctccctctccctctctccccccacctccctctctccccctccgtctctcccccctcccccctcccttcccctctcctcctctccccctctccccctctccccctctctcccccctcccttctctaagccaccctgtggcagagggtactgttcctcactcagcaatgcctgacctggggctgcatggcacacagagagcctaccttcaaatcatttatgtccagtagtgaatggaaactatccaaacccatgtccagccaggcactttgtaggaaatatacaggtaatgctgtaagcaggcagatactgggcactggagaggaccacttaagactctggagggagggaagcatccgcaccagcactgtaggaaatggaagtgtggtgggaaggacatcctagctataaagagacctgtcagaaaaggcatggaggcgggcatttgcctgaagtgtgcaggggaccccagggagctcacctggcagaggctgatggtttgcttaaaggagaggaagcaaatgaagctcagaggtcctgggcacccagtttgtggagactccagagtccatacaaatcagaactggcaattattgcattgtactttctaacattaggttatgttagaggattgctttttagtgattttttttcatttgcatttatcttagctctccaagtaaatgttaagatccttaagggcagggaccatatttcatatttttattaaatgcttttatggtacaaaacgtcaccctataatttattttattctcatattgggttttcttaaagcagggtaaaatgttcttacctgtttaattaggttaatatttaagagtgaaaatatataatgtccagaattaacatcaaactaattcagaggagggaagttggggtagcttaaatgagtgcccatgagttaatggcttgtagctggttgatgggcacacagtgttcactgtattattttccccactttggtgtgcatgggtaattttccataataagatgttgggtctccggtggtactgagtaagccttcagcttgcaggactcccagcacagccccctccctcataccaccacactgtgtagcagccacctgggcccctaactgccagctgagccccttgctacaggcctgacttccggaacagccaggaaaacagctaaggatcaaccattgtgttagggtcctggtacagtcacagctcagtgatgcagacccatcaaccaggtggcaaagatgaccattattttgtatcaccattgtatttgttaaagcactagtgattacagttataatgtaaatattaataaaaaggaaagaaggatgcatgggtgagcaggtcaccttttgtcttagttcgctggggctgctataaccaaatactgtggaatgggaggcttataaacaacagaacttacttttcactgtcctggaggctgagaagtctaagatcaaagcaccagcagatttggtgtctgctgagggcccactttgtggttcgtagacagcaccctctagctgtgtccttacatggtggacgggactagctggctggctgtggtcttttctataaggacactaataatccttgcaagagggatttaatcagaagttttatcttgaaacatctttcttcatcagaaagtgtttcgtatgcacttagaggtagaaaccatagaagatgtatttacagtataagtttctctttaaataagcacatcattctgtcttccttaaatctgctttttcattgtacaagttccaaaactcagatgttgtcaccccttttgtgctgagcatacattagttctctctaggggaaatttagagttttcactttttcttatgtataacaaattttgatttaaaaaaaaaggtatgttctacatcctcttgctctaaataaccccaaatataagtgtcttattatagtatgttgattatttaaatttggaatttccttttgaaagatcctttaaaatgttttatgggtgtttccaaggtaactctcaatgttgtttaattttcatgcttacagtgtataacaaattgaattatctatcattggtcccttaagagataagcagtgtgtctttctttattgaaatatgtaaatttgtgtcaggcagtgtggctcacacctgtaacccaagcactttgtggaggtcaagtcaggaggatcacttgaccacaaaaccagcctgggcaacatagtgagaccccatctctataaaaaatttaaaaatttgccaggcatggtggtgcagacctgtggtcctagctactcaggaagctgaggtgggaggatcacttgagcccagaagtttgaggctgcaatgaactatgatcatatcactacactctagcctgagcaacagagcaagaccctgcctctgaggaaaaaaaaaaaaaagaagaaaaagaaaaaaatgtaaatttagcaaaattggagcctgtgttataaaatatgagtgcttgctcttaattccttgttttgaaaatgactagagatctccaaatgcttcatctacagatgttttacttgccttctggggcattgatttgaaaaaaatcatgatagagaagggaaaggtcttgtattttccagttgtcctttggctttgaaccttgttccaaggcagaagatggactcctttgaggcccttctctgggactgcttggagaagtcagagcaaggtgctaacagagtctagccagcagttgtgcctggccctcactgggcctctcagccctgcctgcaccacctcaacatcacagtcagtcttcagctccagtctccaccagtcagagcagacctcatcagccgtaatggtttatagatgaagtaactaagtgtcaaagagggacatggtttgtccaagtttattagtgtcagagccacctctaaaatccagacgtcttgaattttccctccatgataccattcatagcctaaatgggagaggtacatggtagtcttaaaagtttacacttcgttttcatggtatttattgaaatttcaagtaattgatcagtgcgacagttgccatggggagcatgaaatgccagctgcctactgctcttctgccttccagcctgtctaggctgaggagaggaagacagcagatgtcatggtggtgtgcctggtgcagcttcagctgtcagactaggaacaatggggcagggcgactcctgggccactaccaaaccccccgccccagttaacatatggggcaagtgggaatgagcatgactcccagctcccttgccctggctctttctggccccatcgtgccacaggcctgcctgggaaacactgtgcatgctcgtctgtggccctgcctgagccagcccctgagcagtgtccacgagagacctgggctcaaggagcagcagtctgcagaggtgaagtccttcctctctgcggtctctttgtctgattggtcagcatcactgctttgccacctctgaatgtactttccctctatcctgcccatggtgttattgctagttcataaagttgtaaactgtgaaactgctcccttcataagaaaattaccaaaaaaaaagttcagatcacatggatttataccagtgcagttaaatttctagcctgcccaaggccagatcaagaccctattttggatatggtgagccaggttttacattgctaacacactgagatatgaaacttacgacctatgcctttttgtacaggaaagggtaaaagcaggaattggcccaggccatggctcatacctgtagtcccagcactttgggaggctgagatgggcaacagatctcttgagccccagaattcaagaccagcctggacaatgtggcaaaaacatgtctttacaaaaaatacaaaaatgacccaggtgtggccgggcgcggtggctcacgcctgtaatcgcagcactttgggaggccaaggtgggcggatcatgaggtcaggagatcgagaccatcctggctaacatggtgaaaccccgtctctactaaaaatacaaaaaaaaaaaaaaaattacccagttgtggtggcatgcgcctgtagtccctgctactagggagtctaaagtgggaggatcgcttgagcctgggaggttgaggctacagtgagccgagatcacaccaatgcactccagcctggccaacagagtgagactctgtctttaaaaataataataaaataaataaagcaggaatcatgaatgaaaaagaataggcttttattaatggagattcaatctttgtttcagcttacaaatacgaatatttttacactcattagccctctgtgaagattctcctctcctcagtggcatgtagcctgagagccaaatcctgtttgatttctgatcacatcacctgtcccttgcttattagctttctctactttggttttggaaaacagagtttcaagtattctctttcttttctactctgacagtgtcaatgaaaatggcctgtcttcagtggcttttaggggctctgtggcaatgctagcagaaagcagggcctgagcccatttggtggctcttgagtctctgagttgtctgaagagtcctgcctccatttcaggaaagtgggagcagagggtgacagctgaagagacaggaacgacttgagaaaccccaaagtttccttcagcctgcacctcccccagccccctcattactcacttcccctagccaggctcacgtggctgctgggctgagtcgcctcagctgccgtggcagtgtcaccacctccatcctcactggccagcagcgggaagccgttgttccattagagtcagccgctggttgcttgttcatcttttggtgtgagccctcccaggatatttcctggaacgctggagggaaacatttcttcacccagcctttccaggcttcagctcatcgtagtctttgccttcccattctcacgaaggcggggagacctttgtccaagaaagggaattcaggttactcacccacagcatgctgctgtgctttcgtttagcattctgcccatttggccctcggcattttgggaagctctgcagcttggcctggggctactaatgggcaggatcccacccaatctgttgagaacctcaaagacagcatcactgctgtgggttaggaaggactcttggcacctcgtattcagattctgtctctcattagtatcatcatctttgaagacagacagcagaattctccacttttgcccccatctcctaccttggaatcaaaatattctccttctcccagcctcctaagtaggaattgatttgcatcaggcagtttgactcagtaatgcagtcagccttcctgaggagttgacgcgtaggcaacttcacctggtgccccgcagctgatggcttttagatcacgagtctctgtcctccatctgtcccctcgactctaggcttcccaggtgaacaggcttccctcaaggctgcctccgtgcctccacccacctctccaaacttacctctagccacacctcactgcagatcggccccagaagggtgctgtcagcctctgtctgctccagagggtccctccacatgcagttccagcaacccccaccccagccctgtctccacaagtcacaaccctgcccacacaccaaggcagcaggagagtctgtaccttcccaccagcccccagaaaagagagagaaattgaaaaccgaagattaagtttctctcctttctgtgaatccccttagcctgggtctgtgacagaggtcctaccagggacatttgctcaagattcagactcaagggggcttccagttctagccaatgatacgatggtttgtggagagcttgtcccgagcatggggctccactttatatcctccatgttttcccgaagagtcttttcgcccttacttacaaaaactgttagtgtcacttgtggacactccacagtggtgaaaccatttcctgagctcaggatccgtgtctgccaaccttgtaagtgcccctcttgggtggtaacttagtgcccagagaccccctgcccaagtccctctgtgtcgccagccatggtgttcctagatatgccatgtgttgcaactgtcttttgagccactctcatgatgggcttcttaattttaactttgtgtttcttaacttgtaacttctaataagtggtcctttataatttcctatattttaaatttagttctggcccagcacagtggctcacgcctgtaattcctgcactttgggaggccaaggcgggcagatcacctgaggtcaggagttcaagaccagcctggccaacatggtgaaaccctatctctactaaaaatacaacaaattagccgggcgtagtggcatgcccctctaatcccagctacttgagaggctgaggcaggagaatcacttaaacccgggaggcagaggttgcagtgagccgagatcgcaccactgcactccagcttgggtgacacagcaagactccgtctcaataaagaaacaaataaagttcttcattaattgtaaaattaacataaaatgaaacttttccacattcattgctgatgttattcatagaccagtgcttatcttctttttgttaaattataatatttcatagatttgtcactccctccattacacttggaagagcctgcacttcagtcttgatcaacaatttagctgaactgatgattcattatttctcccagagtttgctgtccaagcccacgtaaaacctcctggccccagtattcgccagaactacctgggagagcatcgtccgggagcaccacccacctcccatcctgggtcatgctccccgcttgttcttgtttcctcccgctaactgacgcaccctgttcaaggagcagaagttattcctctctttcctctacagccaagcaaatgcctcctgtttagctgaagcccaccaacatttggtttaaggacttatcattgatgaactaaagttacacagcaataggatatggaggaggaatgatagtgaggctacgtaatccccaaatttatccttcacccccagaattaaaaaaagaatgtaaatgcgtcctctgctattttacgacaggatctccaaacctgtgtagttttcatctgagcaggactgcccaccacaagccctgcacgtgctgtctgtagtcactaacccatcactcccgacctgcgccatctgccaacagttactggtctgccttgcgaccagcaatctcccatttccttgtctattcagaggcttaatatggtcttgaattttttttttcaatctgctatgtagctattggattttaaattgtattagactctggacctgtgccaggtgcttgctagagtttctgatgctatcttatatcatctttaggtggaagggggaaaacgccattcaactttcgtggtaataaaattattgcagttgtgccctccatctgttcactgaacttcctgtgggttttcaccagatcacatgactgacagcagagatggctttcaggcttttggtctgcttgttgcacccaagtctcaaccaccaaaccagacccttgctttgtctctgagctgggcgtccggatgtcccactgtggtaggttgactcactggagctgataaaaacattccagccaaacttgagagtctagcattacctctggctccaaaaatcaaaacaacaggattgctgtaagtagctttggattgagaccaagctacaagcttgagggatgagttttctctctttgttgagctgtgtcacaggacaagtatctcggaaagagaagcgtgaaagccaggggctcctcaccaaagtagcctgagcttgagataaccagtgccctgccctgtgccagccagttctagctgaattcctgccatgactatgagatccaagcccccgatccttcccaggcacctcctctgccttcccagagctttagtctaagtcctcaaagcacgttgacctgagagtcactagctagagcccaaaggggttcttagaagcccaagggagggaagatgtgggcagagaagagccagacggatgtcggagttaagagggcctggcgatacctgagcagccggggccctgggccaccaagagggtttgttggccatggcagagatgaagacactctcaagtgaagaagttggacttcccttagcctcacaggatggcatcattgttctctacaaagggacataaaggaaagagtgaccttttctaggttgttgatttgacattcagactgacatttcttggactcagtcctgacaaaatgtgtccccagtgtccttagtgctaaattaaaccttttgtctttcttttccttagtactttagacttctaagacatcttagagggagaagcacatatttttaagaattgctatttaagtctcaaaccatgctggctttctctatagggaggtagatggacaggtagattcggagagggggtcaaattaaattcagctcgggcctacccaggttgactgaataacattctcaaaattcttttatgatttatgcctagtgttcacccttttaaagtgttcccaggcactgcccttacaaacagctcccttcaggaaaaaggaagctccttaccatgtgcttccaggtgtttactctgtgtagccagtcctggagaacatgcataaataacaaacagagtgcgattaccctttctgaatcttttaggtgctggtgaaaagttacaggcaaacaaccctaaggaacaatctctctgctcccttgctcactgtgggagaggagctggcgctatggttcggggaatgcgcagtgctgtctgcatgttcaggttttccaataacggctgtgtgttcacgctgctctctctacccgctctttcagtccccccatgaccagtagtgcacacttgggagacagcagtttgggaacccagtctgtggaggggaccaggccttcactagccagcacggacgggggcagcgcctggaacctcagcccacttagctgggagctcccaggccacagagcagctcaacagcagcttcaagcttgtctttgttttcagcagttgggagccttagcctttaaaaatgtctattgtcaacctccaggacattcagataccatctccaatgcaaagtctgtctaagtagaaatcaacaaatgcttaacttcagggttgcagctgaacccaggcccaacccattcaaccctttcttcaagtgaaccctgcagagcctagaggcatggcagggaatacacctttagaccttactggtctaaacataaaaccacacctagtcagaattggaaggagctcaaaggtccttcatttttcacaaggctagaaaactgagtcctgagaaatgctatgacttgccccaaactgcccagcttgccacctgctgagccaagacagagccaaggcctcctgtccccagcctgggctcacctggtgatcaaccccatcactcacagtgaggaaacacggccacaaaaggttaagtgagttgttggttaggaggatattgaagaaacatctgaagctcattattattacttgaaagacatgaaaacctagtgtccacgttggccacagacattctaagggcacactcaggtcccttttgaccctggggaggctccagaggaaaggcctgagcttctttcagcttctggctctaccactcactgctgtggcctctttttcatgtgacttattcttttggggtcttggttttttaaatctctataatggagtgaataatacctgtgtcacaggatttttgtgcagattttacgtcattcgttcatttatttaattcctcattcagcaaacgtgccttaagatgtcagtgacatgccagatgctcataaggtccctgccttcttagagccgatgtttgttctagttggggaaacaaatggtgcacaagtcaacaaataagagaagcaccaattgcactgagtgttgtgaaggcaataagccagtgagccgagagaggccacttttgttttttatagggtggtcattagtgaagcaggaagtgcctggtacatggcagctctagtcagagtcatttccactgagcttcctactgggctgtctgtgaacttcaagcagaaggcttcattcctggtcaaccacagcccccgcagccccgtgtggctcagggagttagctgccatgctggatgttgttgaacgtgctgcacgatcttacaggaagatggtaaacacctaggtcacatacattgcagaagttaccccttcatagatggtaaacccttcttagttaccccattagattgcaaaagcctaatgtcacatacactgtagaagttacccctctggactgggtgcggtggctcatgcctgtaatcctagcactttgggaggccgaggcaggcagatcacctgaggtcgggagttcaagaccatcctgaccaacatggagaaaccccgtctctactaaaaatacaaaaaaaaactagccgggcatggtggcacatgcctgtaatcccagctactagggaggccgaggcaggacaattgcttgaacccgggaggcggaggttgcagtgagccgagatcgcgccattgcactccagcctgggcaacaagagtgaaactccatcttaaaaaaaaaaaaaaaaaaaaaaaggaagttacctctctgtccaccttatcataaccataaacccactccagggccaatcttctcccctccagttgagcctgactctgagacagagaaagaaggcagttcttcagcacctgccttctcttactgaaacagctttgttctttaaaaatgttgatgaagatgagctcagtgcctttaagccatttgtcagcacttgtgtctggttttcatgcagggaggcttatttctattattaagagtcagttgccaagtgagaagtatccatttgggtgcataagagaaatgggcttgtaagagaaatgggctctgtaatcacatctaaagactagacttcgctatgaccaggccatagtaaacatcatagtatgtctagtctttaggtttgattacagaacattataagagcatcccttatacttgcatgtcattttaatgtcagtaataatagccaacattcattaagtacttactctgtggtgggtactataccaagcccttcacgtggcttatctcatccgattgtcagtacaactctgtgaagtaggaaggatggttacattccaagcctcagagtatagtaaaccttaagagcctgatctgagcaaggatgtgagactagtccaaggtcactcagctaataaggactggccttttagctcttgaaggctgggaccccatgtgtcctagtggctgtatttttagtcctgtgcttactatacactaggccctcagtaagtatttactgagtgaatgaatgggaaaagatgggactgaaactcaaattatctgcctgcctttggagttgctttttgtagttgtttcaaagatgaaatgagtaactatatgtaaattctttgaatatgcctgccatataataggtaatcaattgtattagctataaatgctaggtataatctcagaatttattatttttatggagaacttctatggaaataatgatcagcttgaagaataacttcataataaaatctacacgtcttctcttgacagataaagtttatactattttataccatttttgtgtactatcatatgctatatactggatgttcctgagattttgtttgcaacatttgaaagccatagttactaccagccaaagagtgtactttccgattagaggaaagatctctgttgctgagagatgtcctgtgcctttgtggagggtgagatgagttattgtttcaacatcaacttgaggcattttcacttctggttgtaccaggtggtgggaaggatagtcatgggggtgccaggtattttttccagatcctcttttgcaggatttaagggcagtctttgactcattactccttctagcggaatagtcatcagagtttccccaaagccatgagggcaggaaaacttactgctagcccataaacttagtagcagccttgcctaagtttctgtaattcagctggaaggaattcttctgagagcagtttacagtttattggttttatttcccattccaccctccttagagatgcggaaagcagccttgcataagctgcctcacagcctctcctaaggccttcatgggaaaacccccatgtaagtcactgaatggagaaaagctttcacatctttgagtcatttttatttctaacaatgagaagtgcgttttaacagcgacattaccacatcgaaatgtaagatgttattattccaatgaaaacaagccactgggggactctgcacacccacctagcccctctcttctccctgagtccgtgtgaggttttctaaagtttgaggccgtcctaagaactaggattttcgtctccattatcatggatgagtttcatttcttcttcacatagcaccacagtcctctcgtgattattgccctcatgtggttctttttttaaggaccagcagcgtgctgagctctgtacctcacacccagaagggtttcgtggagcctaagagaatcaaatttaaggataaagcattagggtggccagaactctgatgtcacttttcaaactaactttgcacacagtcagacccaggctttaaacctgactccactccagcaggctgcatgaccttgcaaccgagcacttagcctctctgagctccgagttaccttctcttcatggggttggcactggcctcagcgggacatttggtgactgaccaggatgccgtgggagcttcagacggcatgatgtatggggagcgcgggtcggtgggagctacttgttgcccccctcttgctacaaatgcagatttttcacagaaaagaacatcatcgtgttggtacctcttagacacctgattccatgacaaagacttccctctaagcacccacatacctgagaaccccatgtcgggctggaatcaacacagtgtatgaggaggctcccaaactctccaggccctaggataccgccccaccagcagttagggaacacccagagagcactgtgcagggcaggtggggtgcaaggggacttcaggagtggacgaggagggagtagaaagctgggggccttaggtgtcagctgagaggagggaaagaataaagaaagaaaaataaagctggggcctcattgaactctggctcatgtcagcaagtgctggaagtggtgccacatcctgagctgatcaaactttgtcagccagactgggccaaagagcccagctaaagaagttgtcccctccattgcagtcatgagcaacatcatcagcagacactgagacttccagcctgcgctgatgatggcaaagagctggaaggaaacactgatggtctgaaaaggcacaggtttcattgaactagaactagtagtttttgaaaaggggactgcagtgtgggggtgcagggtgtggggagatctaggcctaggtagtgctagagcttggcgtctatttatataacagtctggtagccacaaagtggggagctgctgatcactgaagccatagcagatgggggctgtgtgttgaagttacatcaatggccagaacaccctccgttttaggaattcttacacacttgttcaagatgtaactcttgccacaaagtctttgctgcttcactctgctcctctctgatcattctggaactctgaagatccagcacttagatgtttttagttggttttcttaaatttatttttcaaatttaattttttggtttaattatttttagagacaggatatcactcttaggcccaggctagagtggactggcatgattctagctcactgaagcctcgaactcctgggctcaagcaatcctcccatctcagcctcttgagtagctacagacatgcgccatcacatctggctaatttttaaattttttgtaaagatagggtcttgctaggttgctcaggctggtctttaactcctgggttcaagtgatcctcctgccttggcctctcacagtgctgggattacaggcgtgagctactatacctggtccagatgcttttagtcttaatcactgtaaatgttattttaaaattcttgttactgtgtgtgtctgtgtgtgttgtgtctgtgtgtctggtgtgtgtgtgtctgtatgtgcatgtctgtgtatgtctgtgtgtgtgtctgtgtgtgtgtgggtgtgtctgcatgtgagtgtgtgggtatctgttttgtatgtattgtgtgtgtatgtgtcttgtgtgttttgtctgtggtgtgtgtgtgtgtgcatgtctgtgttgtctgtatgtgcatgtctgggtgtgtgtgtattgtgtgtgtctggtgtgtgtgtgtgtgtgcgcgcgcatgtctgggtgtgttgtctgtgtctgtgtatatgttgtgggtatggatgtttgtgttgtgtttgtgttatgtgtgtgagtctgtggtgtgtgtgtctatgtgtgcgtgtctgtgtgttttatctgtgtgtgcgtgcctcggtgtgtctgtgtgtgtgtctatgtgagtggtgtgtatttggggatgtgggtgtgggtgtgtgtgtgtgtgtgcgcgcatgcagctcctctacctgctcctcccctttcctaaatatcttttaaatccacccagctagcatcatcctagttcaggcctgtttcccccttccctggactaggctcctgcctctgcctgctgcactgtgccctccagttctccccgctgtgatgggagcagccactgcacagtgccattctcatgccttagccttcaggcccttcagaggcttccgggaccttatgtgcagctccccagtctggcctctgctccccggtgtgtgctcttcccccaccccctccttagcctccagcctcacacccaggcctttcctgtgcggggccctccaggggagctcacctccccttcgtctggctgccacctcctcccttctggctccttgtccttccctgccttgctgccctgttattattggttttttgttgctgctgctgctgtttctgtctctctcctccatgaagatttaccttccatgagaacaggagctgggtttggctgccgcacccccgtatctctaggccctggcccacacagtgcctgcctggcacctgccagcagatagtcagtagaatgaagaatgagtgaatgaacaaatgaatggactcccataagaaggactaaattagataatacatacaaagcatctacagtgtgtctgggacatagttggccctcaatacttggttgattgcttcattgattcattcactcatcagtttattaagtgcctggctaatatccttggggatgcagcacctgacaaaacagataaaaacctctctgccctatgggccatgtcttccagtatagtataataagtgtggctgtggatgcatgtggggaagtgtgtggtttcctctctttcagccccctcttcctcagccttccaccgtcctcctcctcccaggaccctgtcccctctctccccacccaacctgggacaagggtcaccaagctgcagccactcctgccagcgacgccttggcaaaggagaggcccaggggccttgggtagactctagccactcctcaagctgctgaaagtggaatcacttcctctgccctggctggaataaataggccaggaataaaagtagaaaatcaaaagcccaaatcccagtgatgtgctaaaacgcaagtgctgccttaggccactgagctgcacgactccttacataacagaggactggagtttgcagaccagggcacctgcgatgtgtttgtagagccaggcctaggccttttcccagactccatgaggagcagcctcgggctccctctccgcaaagccaaagccattgctcctgcctccagggaggaagagactgaggccaagctatggccaagaaagctggccaccccagacccccgctcctccagagtagcccccctccaccggtggcacatgcctaccccttcaggtcagggctcaggattgtgaaggggaaggtcctcacctccagaatggtggaaccctgaggacagtgcctctcaaaagccagtccctagcattgcactctggggaatatcagcctgagccttgtctgcctcccaggcagggtccatgtctcagctaggatatttctcatcataccttaaccactgttggggtccctagcagggaactatcagccaaactgacattagccaaccaggacccattgtgttacttgctctctccatcggtaattcacattttctcaggagccatttgatagctgaaatattttaaagccccagagctttcatgccctgtgaccagttggcaggggtgggtgggctccccgcacaccacagcaccacctgcaaactctcaccacttttgcttgtgcatggaactgtgggattataaaatcatcttattttcattgcagaaatttccagaattgaaattcaaatatgtggaagaggagcagcccgaggagttttttatcccctatgtctggtctcttgtctacaactcagcagtcggcctgtactggaatccacaggacatccagctgttcaccatggattccgactgagggcaggatgctctcccacccggacccctccagccaagcagcccttcaagttcttttatttctgggtaacagaagtagacagacaggttacttggtgtatcttctgttaaagaggattgcacgagtgtgttttcctcacacactttgatttggagaattggtgctagttggcaatagataactcagcgtagatagtattgcaaaaaggggaggaaatacacaacaataataaatgtaaaaacctgctattcaacatgcagttttatttcgaagccaaaaatctagagctttcccaagatcctgttgccttaggcacatcacacttcaacagtgcacactatccaacagtgcacactattcaacagtgcacactattcaaaagcgtagactatttttttgcatgttcaagatatttgttttggtcttatgtgtgtgtgagagagagagattcctttgacattaaggagcatcaatgagaaaagatgatgaggcaggaattaataaagaaatgaagtcgtgtgtgtttggttgcctgtcagagggcacacaatttcataaacaccatgcctggacaatttgatattaatatttaacacctctgcatcttttcttaaaaaagaatatgggccagatacagtggctcacatttgtaatcccagcactttggggagccaagttagcagaatcccttgagcacaggaatctgaaaccagcttgggcaacatagtgagatcccatctctacaaaaaacttaaaaattagccaggcatgatggcacattcctgtagtcctagctactcaggaggctaaggtaggaggattgcctgagcccaggagttcaaggctgcagtgagctaagaacgtgccagtacactccagcctgagccacaaagtgagaccctgtctcgcaaaaaaaaaaaaagaaagaaaagaaaaagaaaatggctacttctcatgaagcccagattaacttttctgtgaatatggcctgtgaactgttgctggaattaaattggagtctagcacaaattaagttaatctactctgtattaatcattgggaaaaagaaaagcttcatttgaaaacagtctttttccttcacccacactaatagaaaaaggagagtaatttgttcatactgtattccacgtgggatgaaaagcatgttttgctctttgtttctgggccggtgtgatccgtgtgttggtgcctgagctggaggaaggagcttcttgcagggaaacagccactggggccacattgagggccagttgggaccttcctttccagtcacactctgtgtcctcacgggccccttcacagtctagataaggagcctagtttcattctcaaagaaaaagtatttggtcttcaacatagaaagcacaaaagcccagacgagactgagcacactgttcgaatccactgccagctcatctgtgtcagggctggcttctcctgtcctgtgtcccagggctgcaggcccgtgttatttgagtccatcaaatcttccgagggcctcggaggaaccattctcagtcaccccaagctctgtaaaaggtcaaaacactggcagcctctcagtgcaccactgtgtgggctccacacgggaaggcctggccaagctgtgctcttagaggctgtcgaggtagggcaggaagcttccctatcctcgtctggatggaatgaaacagaggttccctaaggccaagggactcgtggagcgcccatcccgggtggggtcccagaggtgagtgcagcttgcctcctgtccccaaggggcttgttctgtcaggcctcctccagtcactgctggagtggggactctgactcctgtgttcacctcagagcccatgtacaggctagaggtgaggcttggcaacaacttctactaatacttagctttgtggcagagccagtctgaaggaggagaagcgctctcagccagcagggggagtgatgattatcatttcaggtagcaaggatatgtatttactatgtggggaaataatttgcaactttaatttgtttccaaagcattttgattggcttccttttcctttaaaccaaaaaattgtttaaatgtttaagggtcatgtggaacagctgagcttctggcaggaccacagaactgtcctctgagtctgagggctgggcagtgccacaggacagtccctgggctgcaggactgtcagtgcttgttgtgtgaggaaatgaggcccttcaaaaacccagtcatcttgacagagggcacactcccaaggaaggcctgactggggaatcatacagcctctcctccaggcctctgggctcactgaggtgcccccagaaccctgattgccctcccctctttcccttttctcattcatcacacagtagaagcactcactagctaacagctcagctggggcagcagcctccatggaggcctgcaagtgatgctcccagtcctggttcccgctcaggagggaggccccaccacgtgcatcactgcctcagctctgcaaagtcaccagaggcttcttcctgatttttgtgaaagatttattatatggcaataaatctgaatgataaactttcattatacttgcattaattttgagtattagtttgcttagaaatttttacacgaagtaaaaatgtgtaatgatgcaacacaggatcatcgtgtgttcagatggaaattggcatctgattttaccccagatctgaagctgttactgcattgtgtcattttatcaacaaagacttctgccacaatatttacttttaaaagaatttgtccctttcaatagcatcttccctatcaagagttcaaggcactttgcagaagagcttcagatttctaactctagttcccacagtcacccgttgaggctggtgtcatacaatctatgaacaacaaccttgcagcaggactgccaccattcagcagtgcagacagcacagctcaaggacaaagacagagaaaggaaagaagagaaggtccctgaaggtgaagcatagaaagtacactgcacacacagttctctctggaaggaaagcacaggagctgggaagtagacgatagaaagtggaaaggacacaggaccagcatcagaacactcagcaacttcctaagagcttgctaaggtacatccaagagaaatatttagtgagggaaacttttaagcactggaattgttaatatatcatactttaagcaacatttcgtcctttagattccgggagccagggttttgcattgggtggtagagctctctgcataattgagtcaccctgtgcttttttgcagagccataaatttttggcacttgctgatacttcataggctggagtctctgcaaggtcaaccctttgggtctcttaattctttcctaggcactatcctgcaatatcagtagttgccacttgattttagggactgattattaggccttctgactccaaattcagaacaattccagtgtcctacatcacctcctggagtcaaagaggtcagtttctattcagtgatgaagagctaagctagctatgcatatgaagaactgagaagtagattataacacacaatccacagcaaataatgcatatttattttgtatgaattaaagcataaaatttaatctcattagcgtatagctattcagagttcccactcaaagcaagggagactcaccagtagccccaagacccttggccaggtcatactcaacccctaatctaacttcacaaggctgtctaaatgtcagctactcagacacagcctctggcattagcaaaatcccccagaggaaaagcagccccatagaactggacaagtaatacttaactatcttgttgactctggggtccttcaagcaaattttaaaaatatttttaccagatttccaagttgtccttagcttgagggttggtcctccattactgtcattggactatccctcatgggtagtgcagttcaacttctaaaccacctcagtacctgaatgtggtccgaggtgaaaccagattactgatgccttcaggtgcccaattgaagcaaatggcaaattctgtggaggaagtaaacataacccaaggcctcaaattatttctgcagtgttgcaatcagaaatacccaggtatgggagaagaccagacaacattaattacttgaattaaaaccattagaggaaaacacagacaatagaaatatccaaacagactccagataaagttgtcgcagaatttaaaacagctatggttactgtgttcaaaaaaatgagacgcatggtcaagaatttcaacagagagttagaaactgtaaaaggcgcattggaaattctataactaaagtactgtaatgagaagaacagtgaacaggtttaagagcagattagaaataactgaaaagagaatgagtaagatgaaaaattgagggtgaggggtgggagcaggaattatatagtaaaaaaaacagaacatggagaatagagggtaagagacttaaagggtacagtgagcatgtctgacctgctcagacatgcagggtagttggcatctcaaaagagtagaagaaaggaatatttaaacaaatggctgagaacttttccaaaactcatgaaagatatcacaccaaaaattcaagaatccctcccacaaactccaagtgggataaataaaaacaacccacacctagaaacatcatagtaaaactgttgaagaccaaagaaaaataatattttagacctgctggggtgggagagggaatataaccattaaaggagcaataatattagactgacagctccttctcagcagaaacaatggaagacagtgaaatactgccttttatggttctgaaagaaaatgactgccaacctaaaaatttctaatcagggaaaatatcctgcaaaaatgaagaggatatgaagacatttttagagaaacagctagaagaattaatcagcacgcctaccctaaaggaaaatttaaaaggtgttttacaggcagaaggaaaataatcccaaacgtaaggacagagccctaggaaagattgaagagcaatgaaaatgacacataaatattgactacataaaacaataattatgtcttatggagttttaaatatatagagaaataaaatgtatgaaaatgaaaggatttatgtgggaattttaagtgttctaagacacttggcatcatccaagaagagagtaaaaattcatttaatattagtctttgataactcatgtatgcatgataatatttgagatatcaataaaagtgtatagctttccacataataagagagaattcgaataatcaattcagtggaagatttaagaattgcaaaagagtctaagaaagaagaaaaagcagaacaggtggaacaaatagaaagcaagatatttgtgataaatccattattacactaaatgtaaatggactaatgctcaaatgttgacaaatattgtcagccttgttttaaaccatatgctatttacaagagacatttttagaacatgaatttagaaattttggaagaaaaagatggagaaatacatacccagcaaacagtaaccatgaggaaactggtgtagatatatttaagtaaactttaaggcaataatttttttaagaaataaaagggtcaattcaattactagaaagataatctaaatttatatgcacttaaaatataaactcaaaatatgtaaaagaaaatttgataggaaatttagacaaatatgcaaccagagtgatattttaacatgcctattttgttaattggtagaaaaactagcatacaaaaatcaagttataaaagatttaagcaatgaaatgagcaaaccaaacggatgtatgtaggacaccaaactcgataacatacttttcaaacacaaatggcacacactccaaaatactgggctataaaggtttcaacaggctaggcacagtggctcacatctgtaatactagcactttgagaggccaagtcaggaagatcacttgagcccaggagtttgagaccagcttgggcaacataatgaggccccacctttacaaaaaataaaaaaattaactgggcatggtggcatgtgcctatagccccagctacttgggaaggtgaggcaggagaatcacttgtgcccaggaggtcgaggctgcagtgagctataattgcactactgcactccagcttgggtgacagagcaagaccctgtctcagaaaaaaagtctcaacaaacctgaaaatacttcaaatgaaatatgttctctgaccataatagaatcaagactaattatttacaaaaagataattttataatcctcatatttttggaaatagatttccaggtaacccatctgtcagaatcttaatggaaatttgaaatattttgaactgatcatgaaaatactacatatcaaaacagagaaaaaacttgtgggatgcaaataaaactatgcttagaagaccttttaattttattttaaatttaaagagtacctgttcaggtttgttacaagaatatattgatgatgctgaggtttgggctcctaatgatcctgtcacccagatagtgaacatagtacccaatagaaagtttttcagcacttgcttccctctctccttcccttcctccctcgttttggagtccctagtgtctattgttcatatatatatatacacacacatatatatttaaatgtttatgttagaaaagaagaaaggttaaaaatcaattaagcaattacctcaaaaattttaaaaacagcacatgaaacccaaaaataagccaaattactgatatagaacacaaatatacaataaagggaatcaaagtcaaaagttggttatttaaaaggattaagaggactcattggctgggcatgttggctcacatgtgtaatcccagcactttgggagtcacctgaggtcaggagttcaagaccagcctggccaacatgatgaaaccccgtctctactaaaaatacaaaaattagctgggcgtggtggtgggcatctgtagtcccagctacgcaggaggctgaggcaagagaattgcttgaacctgggaggtggagggttcagtgggcagagattgtgccactgcactccagcctgggcaacagagcgagactccgtcccaaaataaataaataaaagaattcataaccccttaaaagactgatcaaagaaggaaggagaaagggcaggagagaggaatagccaatatcagaaaggaaaacaggtaagttacttcagattatgcagacatttaaaatatttaagagccagcctggataacatggtgaaaccctcctgtctctacacacacacacacacaaattagctgagcatggtggtgtgtgcctgtagtcccagctactggagaggctaaggtaggaggattacctgagcccaggaggtagaggctgcagtgagctgtggtcatggcaccacactccagcctgggcaatggagtgagagaccgtgtctcaaaaatatgtatacatatttaagagaatattatgaataccaataaattttaaatctagttgaaatgatctttattgcagtgataggtgtatacatatgtctaatcaaattgtacactttattacatatgtgcagttttatatattaagtatgcctcattaaagttgtttttagattttgcataaaatgaacaaattctttaaaaaaaaaaaaaaactctccaaaactgacatgaaacgatcctgaacattggaatcatcctatatctagcgcatacattgagtccataattacaatctgccacaggaaatttacagaccaagatggcttcagtagtgaatttaaccaaacatttaagagtgaaataatgccagttttagacagtctcccagaaaatagaaaaaccttctaatttgttttatgaaaacagcttaaccttagatataaagaatttgccaagaacaatacaagaaaggaaaattataggccagtcctcatggtatagatgcaaacagaaactagcaatctacaaaaacaatgtgtaaaaatacatcatgatcaaattggatttgtcattcacaaatcaattagagttattcaaagaatacagaaggaaaagtaaatgatctcaataaatgcaggggaaaatgtgataaaattcagcagtcaagtgctagaaatgtttagcgaactaggaaaaacggaagctatcttaatcttataaatattattttaaaactacagcaaacgcatcatacttaaaatatcaaaagctttcattctgagatcagaagcaaaaaaaaggatgtctattatcacttctattcaaaatgtcgctaggtgatgctatgcatgcctaagtatttagtggggagtgtactggtaccttaaattactttgaaatgcatcatgaaaagggaaaaaaggatggcttgatggatagatatatatgtgataaagcagatatagtaaacttggtaaaatctagaatggtagaatccagatggtgggtatacaaatgtacactgtacaatattcaattttgctatacgttgaggaaactatcacctgagttcctggcctagtatggcaagatttccttttaaattaattgggtagggtcagaagaaaatgaactatcattatttgtaaatgacatgattgaggatatagataatttaaagaattagccaataaactagtaaaattaacaaggcttctggacacaaggtcacagacaaaaataacgtgtatttctgatgctagcaataaacaattagacaatgaaattgcaaaggatatgaacagatacttctcaaaagaagacatttatgcagccaaagacacatgaaaaaatgctcatcatcactggccatcagagaaatgcaaatcaaaaccacaatgagataccatctcataccagttagaatggcgatcattaaaaagtcaggaaacaacaggtgctggagagggtgtggagaaataggaacacttttacactgttggtgggactgtaaactagttcaaccattgtggaagacagtgtggtgattcctcaaggatctagaactagaaataccatttgacccagccatcccattactgggtatatacccaaaggattataaatcatgctactataaagacacatgaacatgtatgtttattgtggcactattcacaatagcaaagacttggaaccaacccaaatgtccatcaatgatagactggattaagaaaatgtggcacatatacaccatggaatactatgcagccataaaaaaggatgagttcatgtcctttgtagggacatggatgaagctagaaaccatcattctgagcaaactatcccaaggacagaaaaccaaacaccacatgttctcactcataggtgggaattgaacaatgagaacacttggtcacagggtcaggaacatcacacactggggcctgtcgtggggtggggggaggggggagggatagcattaggagatatacctaatgtaaatgatgagttaacgggtgcagcacaccaacatgtcacatgtatacatatgtaacaaatctgcacgttgtgcacatgtaccctagaacttaaagtataataaaaaaataaataataaaacaaatactcagagatcaatctaaaataaagtgtgattgaaactaaagatctaaataagggttccctaaataagggaccactccagggtcattagattcataagttggaaggctcgatatctcagaattgatctacggattcaatgcaatctcaatccaaatcccagtattttgggggaatgggaaaacttgacaaattggttttgcctaaaatctacatggaaatgcaaaacgcctagaattgcacagaaaaccttgaaaaagaataaagcccatacttacattgctagatgtctacaacttacagatgtactctaattaaaacctataggccaggtgcagtggctcacacctataatcccagcacttgagaggctgaggtgggaggattgcttgagaccagcctgggcaacatggtgaaactctgtctctacagaaaattttaaaaattagccaagtgtggtggtgcacacctgtagtcccagcagctggagaggctgaggcagaaggattgcttgagcccagaggcagaggtttcagtgagctgagactgcaccactggactccaacctaggtgacagagcgaaatcctatctcaaaacgaaaacaaagacttacaaatttactctaagtttagtattgttataagggtagacaaaacatattgatgaaatagaacttaaaggtccacatatataaggacaattgatttgacaaaagggacactgctgggtaatggggaaatgatttttttccccaataaatggcgttggcacagtgaagggaaaatgaatcttgacccctacttcactctgtctgcaaaatcagttcccaggggactatagagctaaatgtgaaatgttaaaccataatattctagaagaaagcataggagactat

SEQ ID NO: 115 - DNA, 3363 bp, Homo sapiens
gtgccacgtgaccacctggctggcgcgcgcgcctgggggtctggtccctagccgcgttctcggtcgcttccctcttctctcgccgcctcctggcctccgcaccgacgcggcccgggctggagccgagccggggccgagctgcaggccggaccggagccggatctgtacccgctgagacgtggaaacatggaggcctgagccggtgtgcgccacctgggctgcggcggcgacagcgacttctcctgacccctctgccaccctcccatccgtccgcgggtccgtggagctggagcagatcccccagccggctgagacaggttgtcttttggaaatgcaggtttaaggacaaattatctgcttaagctagaagatgggatcgaatagcagcagaatcggcgatcttcctaaaaatgagtacttgaaaaagttatcaggcacggaatctatctctgagaatgacccgttctggaatcagcttctctcattttctttccctgcaccaactagcagtgagttgaaactcttggaggaagcaaccatttcagtctgcaggtcattagttgaaaacaatcctcgaacaggaaatcttggtgcactaattaaggtcttcctttctagaaccaaagaactaaaactttcagcagaatgtcagaaccacatcttcatttggcagacacacaatgctttgtttattatttgctgtttgctgaaagtgttcatctgtcagatgtcagaggaggaattacaacttcattttacttatgaagaaaaatctcctggcaattacagttctgactcagaagatcttttggaagaattgctgtgctgtttgatgcagttgatcactgatattccactcttagatattacatatgaaatatcagtagaagctatatcaacaatggttgttttcctttcctgccaactcttccacaaagaagttttgcgacagagcatcagccacaagtatttgatgcgaggtccatgtcttccatacaccagcaaacttgtgaagaccttattatataactttatcagacaagaaaagccacctcctccaggggcccatgttttccctcagcagtcggatgggggaggactgctttatggacttgcatcaggagtagcaacaggactctggactgtcttcacactaggtggtgtgggcagcaaagcggctgcctctccagagctttcttcccctctggccaaccagagtctcctgcttctgctggtgttggccaatctgacagatgcctcagatgcgccaaacccctacagacaagccattatgtccttcaagaacacacaagatagcagtcctttcccctcatcaattccacatgccttccagatcaactttaatagtttgtacacagctctttgtgaacagcagacatctgatcaagcaactctcctcttgtataccttgctccatcaaaatagtaatattagaacatacatgttggctcgcacagatatggaaaatcttgttttaccaattcttgagattctgtatcatgttgaagaaaggaattcacaccatgtgtatatggcccttataatattgttgatccttacggaagatgatggcttcaacagatccattcatgaagtgatactaaaaaatattacttggtattcagaacgagttttaactgaaatctccttggggagtctcctgatcctggtggtaataagaaccattcaatacaacatgactaggacacgagacaagtaccttcacacaaattgtttggcagctttagcaaatatgtcggcacagtttcgttctctccatcagtatgctgcccagaggatcatcagtttattttctttgctgtctaaaaaacacaacaaagttctggaacaagccacacagtccttgagaggttcgctgagttctaatgatgttcctctaccagattatgcacaagacctaaatgtcattgaagaagtgattcgaatgatgttagagatcatcaactcctgcctgacaaattcccttcaccacaacccaaacttggtatacgccctgctttacaaacgcgatctctttgaacaatttcgaactcatccttcatttcaggatataatgcaaaatattgatctggtgagtgtaaatgaagacatttattatgattcttttttaagtattaaagcagagaatgtttaataagccttggtaagaactataatagtaagagtttcttctttcaacattaactgtatttgcagtctattttactataatagttgtggtaatctgtgtgtgtgttgtatatacacacacatacatatttaatacaattgaagtcatacttcatacagttttttattctgacttttttactttacacttagaccatgagcatttttctgtggtattatcaattctttgaaagtctcacattttaatttctatctagcccatgtttgtgtcctaaaatatatataactattatcccatttttgctcatttatttccagtattttatatcaattcataatgaatgaaaagtttataaataagtcttatctcaaattttaaaattatatttttgatatggttttaaagctggaattttactagtttttactgtcaaaagatatctttattttcaagattcaacacaggttgccaaattgctttccagaaaaactgtagaatttatgcctgtgggccgggtgtggtggctgatgcctataatcccagctacttgagaggctgaggcaggagaatcgcttgaacccaggaaatagaggttgcagtgagccgagatcacaccattgtactctggcctgagcaacgagagtaaaactccgtctcacacacaaaaaaaaaaaaaaaaaaaaaaaagtgatctccttctttagctcaaggttgctgcaagctggagctgagctgtcagtggaacgggtcctggaaatcattaagcaaggcgtcgttgcgctgcccaaagacagactgaagaaatttccagaattgaaattcaaatatgtggaagaggagcagcccgaggagttttttatcccctatgtctggtctcttgtctacaactcagcagtcggcctgtactggaatccacaggacatccagctgttcaccatggattccgactgagggcaggatgctctcccacccggacccctccagccaagcagcccttcaagttcttttatttctgggtaacagaagtagacagacaggttacttggtgtatcttctgttaaagaggattgcacgagtgtgttttcctcacacactttgatttggagaattggtgctagttggcaatagataactcagcgtagatagtattgcaaaaaggggaggaaatacacaacaataataaatgtaaa

SEQ ID NO: 116 - protein, 593 aa, Homo sapiens
MGSNSSRIGDLPKNEYLKKLSGTESISENDPFWNQLLSFSFPAPTSSELKLLEEATISVCRSLVENNPRTGNLGALIKVFLSRTKELKLSAECQNHIFIWQTHNALFIICCLLKVFICQMSEEELQLHFTYEEKSPGNYSSDSEDLLEELLCCLMQLITDIPLLDITYEISVEAISTMVVFLSCQLFHKEVLRQSISHKYLMRGPCLPYTSKLVKTLLYNFIRQEKPPPPGAHVFPQQSDGGGLLYGLASGVATGLWTVFTLGGVGSKAADELSSPLANQSLLLLLVLANLTDASDAPNPYRQAIMSFKNTQDSSPFPSSIPHAFQINFNSLYTALCEQQTSDQATLLLYTLLHQNSNIRTYMLARTDMENLVLPIILYHVEERNSHHVYMALIILLILTEDDGFNRSIHEVILKNITWYSVLTEISLGSLLILVVIRTIQYNMTRTRDKYLHTNCLAANMSAQFRSLHQYAAQRIISLFSLLSKKHNKVLEQATQSLRGSLSSNDVPLPDYAQDLNVIEEVIRMMLEIINSCLTNSLHHNPNLVYALLYKRDLFEQFRTHPSFQDIMQNIDLVSVNEDIYYDSFLSIKAENV

SEQ ID NO: 117 - DNA, 2896 bp, Homo sapiens
gcgcgccgcgtgccacgtgaccacctggctggcgcgcgcgcctgggggtctggtccctagccgcgttctcggtcgcttccctcttctctcgccgcctcctggcctccgcaccgacgcggcccgggctggagccgagccggggccgagctgcaggccggaccggagccggatctgtacccgctgagacgtggaaacatggaggcctgagccggtgtgcgccacctgggctgcggcggcgacagcgacttctcctgacccctctgccaccctcccatccgtccgcgggtccgtggagctggagcagatcccccagccggctgagacaggttgtcttttggaaatgcaggtttaaggacaaattatctgcttaagctagaagatgggatcgaatagcagcagaatcggcgatcttcctaaaaatgagtacttgaaaaagttatcaggcacggaatctatctctgagaatgacccgttctggaatcagcttctctcattttctttccctgcaccaactagcagtagtgagttgaaactcttggaggaagcaaccatttcagtctgcaggtcattagttgaaaacaatcctcgaacaggaaatcttggtgcactaattaaggtcttcctttctagaaccaaagaactaaaactttcagcagaatgtcagaaccacatcttcatttggcagacacacaatgctttgtttattatttgctgtttgctgaaagtgttcatctgtcagatgtcagaggaggaattacaacttcattttacttatgaagaaaaatctcctggcaattacagttctgactcagaagatcttttggaagaattgctgtgctgtttgatgcagttgatcactgatattccactcttagatattacatatgaaatatcagtagaagctatatcaacaatggttgttttcctttcctgccaactcttccacaaagaagttttgcgacagagcatcagccacaagtatttgatgcgaggtccatgtcttccatacaccagcaaacttgtgaagaccttattatataactttatcagacaagaaaagccacctcctccaggggcccatgttttccctcagcagtcggatgggggaggactgctttatggacttgcatcaggagtagcaagactctggactgtcttcacactaggtggtgtgggcagcaaagcggctgcctctccagagctttcttcccctctggccaaccagagtctcctgcttctgctggtgttggccaatctgacagatgcctcagatgcgccaaacccctacagacaagccattatgtccttcaagaacacacaagatagcagtcctttcccctcatcaattccacatgccttccagatcaactttaatagtttgtacacagctctttgtgaacagcagacatctgatcaagcaactctcctcttgtataccttgctccatcaaaatagtaatattagaacatacatgttggctcgcacagatatggaaaatcttgttttaccaattcttgagattctgtatcatgttgaagaaaggaattcacaccatgtgtatatggcccttataatattgttgatccttacggaagatgatggcttcaacagatccattcatgaagtgatactaaaaaatattacttggtattcagaacgagttttaactgaaatctccttggggagtctcctgatcctggtggtaataagaaccattcaatacaacatgactaggacacgagacaagtaccttcacacaaattgtttggcagctttagcaaatatgtcggcacagtttcgttctctccatcagtatgctgcccagaggatcatcagtttattttctttgctgtctaaaaaacacaacaaagttctggaacaagccacacagtccttgagaggttcgctgagttctaatgatgttcctctaccagattatgcacaagacctaaatgtcattgaagaagtgattcgaatgatgttagagatcatcaactcctgcctgacaaattcccttcaccacaacccaaacttggtatacgccctgctttacaaacgcgatctctttgaacaatttcgaactcatccttcatttcaggatataatgcaaaatattgatctggtgatctccttctttagctcaaggttgctgcaagctggagctgagctgtcagtggaacgggtcctggaaatcattaagcaaggcgtcgttgcgctgcccaaagacagactgaagaaatttccagaattgaaattcaaatatgtggaagaggagcagcccgaggagttttttatcccctatgtctggtctcttgtctacaactcagcagtcggcctgtactggaatccacaggacatccagctgttcaccatggattccgactgagggcaggatgctctcccacccggacccctccagccaagcagcccttcaagttcttttatttctgggtaacagaagtagacagacaggttacttggtgtatcttctgttaaagaggattgcacgagtgtgttttcctcacacactttgatttggagaattggtgctagttggcaatagataactcagcgtagatagtattgcaaaaaggggaggaaatacacaacaataataaatgtaaaaacctgctattcaacatgcagttttatttcgaagccaaaaatctagagctttcccaagatcctgttgccttaggcacatcacacttcaacagtgcacactatccaacagtgcacactattcaacagtgcacactattcaaaagcgtagactatttttttgcatgttcaagatatttgttttggtcttatgtgtgtgtgagagagagagattcctttgacattaaggagcatcaatgagaaaagatgatgaggcaggaattaataaagaaat

SEQ ID NO: 118 - protein, 656 aa, Homo sapiens
MGSNSSRIGDLPKNEYLKKLSGTESISENDPFWNQLLSFSFPAPTSSSELKLLEEATISVCRSLVENNPRTGNLGALIKVFLSRTKELKLSAECQNHIFIWQTHNALFIICCLLKVFICQMSEEELQLHFTYEEKSPGNYSSDSEDLLEELLCCLMQLITDIPLLDITYEISVEAISTMVVFLSCQLFHKEVLRQSISHKYLMRGPCLPYTSKLVKTLLYNFIRQEKPPPPGAHVFPQQSDGGGLLYGLASGVARLWTVFTLGGVGSKAADELSSPLANQSLLLLLVLANLTDASDAPNPYRQAIMSFKNTQDSSPFPSSIPHAFQINFNSLYTALCEQQTSDQATLLLYTLLHQNSNIRTYMLARTDMENLVLPIILYHVEERNSHHVYMALIILLILTEDDGFNRSIHEVILKNITWYSVLTEISLGSLLILVVIRTIQYNMTRTRDKYLHTNCLAANMSAQFRSLHQYAAQRIISLFSLLSKKHNKVLEQATQSLRGSLSSNDVPLPDYAQDLNVIEEVIRMMLEIINSCLTNSLHHNPNLVYALLYKRDLFEQFRTHPSFQDIMQNIDLVISFFSSRLLQAGAELSVERVLEIIKQGVVPKDRLKKFPELKFKYVEEEQPEEFFIPYVWSLVYNSAVGWNPQDIQLFTMDSD

SEQ ID NO: 119 - DNA, 228006 bp, Mus musculus
  misc_feature (1)...(228006): n = A,T,C or G
acattctgtcccaggacagaacttaagcagactgccttctatggtggctttcttctatggtgccagcccagtgcctccaagtgacagctcctccagccaccctgtaaaggaaaatagctgcccactctcttctcagagcagtgagctctctgcatatttctgtatagactgtcaagtgggcgtcacttccaacttgctctagatttatttccaagttcttaggggcacacgcatttttgtgctcataggcgacctctttttactctctcgctggacactgtcatacttggacatctggaggtccaggcatgcaacatgtgggtgaggggagccgtgtgcctgatgactgtggccaatggggaggtaacaatggggtcccaggcctatgcaagctgtaggttgactgtggtctaactagaccgatatgccttcccatcagctgactgttaaagtatgaaaaggtgggccagagttgactgaccttctgaaaagtcgaaatgtggatacttgcacgagatcttttgatttatagatattcactcaaatattttttaagccctcagtcagataaaacacatcatagtccaagggtggctaagagctgcaggtgtctctgttttgtggctgtgctggtgtgcaggatgaatttgtcatctgaggggtggtgtgtgtagtggtttaagtgaaaatgtcccctgtagcctcccgcatatgaaaccttggtccccggttggaagagctgtttgggaaggctgaggaagtgtggccttgttggcagaagtatggcattggaggaggggaaagagagggggggagggggagnnnnnnnnnnnnnnnnnnnngagagggagagagagagagagagagagagagagagagccctcacaatttcttgtttgtttactttgagtcctgcttcagttcaccatgtgagctctcgtctccatcctacagctgccatgcttgacaagtgcccatcatagtgatgacttctttcccctctggaagagtaagccctaagaagggcttccttctagaagttgctttggtcaaggtgttttatcacaatgatagaagaaaaaaacaaaacaaaacaaaacaaaacaaaaaaactatgtacctgtgcagaggccagtgggccctgtgaaccactgaagagctgttttgagagccactgtgagccgagggtccaggtgacaagaggacagcttgaggagagagaaatgggtactgttcttggcttgacaccgtcagtgtcttctcttgatactgaagaccagcggaccctcctgtgtggtatagccccactgagacccaggggcctgaaccactgatcctactgggctgttgttcaggaagatgttgcagagacaaagagaactagctgggggactgtggttaccccaggagggacactggagagtaagtgttacctgaggagggcctgggtgatggggccactgcatttagagttttcaggcctaacctgaagtgtccttctgggttcacagcaggacacatttggtctcccttccccttcctaacacgctctcaggtagttctttttcttagtgtgtaaatccagaggcaccagtgggaggcgggggtagcggcagccatctacctggagtgcagggaagaaagagactgggtcctcttgagtctgtgcagcatggcagaactgagggtaccccagatttgtaacctgggagaggatcagacttaaggctcagtcaaggcatggggaatctaagatggtgcgaccttaaagatcgcgctccctggcagcagtagtcaaggagagcttcatggagggtgcggtattcctggaaacattccctaaacccaagggtgtgtagttcaaagaggcagaggcaaagaggcagaggcaagagagagtgcaaaagcagagtgagggagaacagaggtggcctcgaggtccagcagtaaatgagggcttgctgggtacctgggtggggtgagcccctctctcatgcatcattgtgcctcgtccttgcagttcattatgaggcatatgttcatcagcgtggtttacagacaagcaggcaggcgagggatagtccagagttatgtatgcagtaggcattgagctaaccagtggtacaatcagatcccataccctttatattcttccatctcaagagcagaggcagtgatgaaaccacctggctccaacaagagtgtgtggttcacttggctggctggtgaccctgcacagctttggtcagttgtacctgacctccatgtcccccggcacctgtagggtacagtgctcaacaagagtccaggactccttagttgtaatagatagtcttgaggaggctctgggacattataggaagatgtcaagccatggattgggaggaagatagtggacaagaggatccctgcgtcctgtgtttgacattcgagaagctggaggggactggagagaacaggatctcagtggccactggcaggagaactaaggaagctggtcctgaagcccacgctagggtgtgtgggaggcctgaacttggggtggagacaggtataagatacggcagcacctcaaagatcttgctgtcttgtcaaggctagataaagacccataaatattttaagaacagcccagggctgagtaacaggatcggggaggataataaggtgtcagaggcattgtgcttcgagccaagggaggtggtcaatatcagatgcaagtggaggcccctgtggtccttgagaatttgaagggaaggcagacctgtatgtacagtagggatatcccagaaataatgcagggactggacctacagagcctgcctgaatgcagtcccctgcctcaggtgtcctggacccagctgctgctctgacatttctctcttgagaaacacagctggaggcctgggctggaaggaggatgtcatgacagatcacctagcccctctctcagcttctctctatctagaccttccaggactgatggcagctgcacagaccagctaccctcagaggccacagcgcaagtcctgccttctgctgcctgtgtctgtacaccttctcatgggtgcctgctcccagtcaccctgaccttgctctcaggatggagcagtgagcaaaaggggctctgtccagagttgactcacatagtagggctacatacaggatgacttagtctcctatagagtgttccccaccctctcatgcccactctgtgctaatgatggtaacccagatctacacttggagggtcacaaaggctggccgtcaccaggagacggggagctgattcggatgggtgaattgtgtctaggctgactatagcaagaggcatctgtgcatcctccggcaagtgtttttacctgcaggttttgatcccttcatctgcacagggtgccctgtgaggctgtattctcgtagtgccactagagccttgcatcccagattttaggaacaagcacagtgtggaggtagtacccaggaccacctccctccccaggagatagttccctcagcccactgaggtcctactctgtgcaaactctccctgcacaccgcatggatggtaagaggagagctcacatcttatgactacctagccaaaaggtcaggatggagcctccagctattccactatgccagggggtggggcgggatatctgaataggtgggagtgataagtcagcttctctgatcttgggtagcctaaagatagttagtcctctgccaccaccagcagcctgagagctggctagaaacatagactcccaaaatccatgttggtacatgcccataatcccaacatttgggagacagaggcaagatgatcaggaattcaagaccaacctggggtatgtagtgagtctgttttaaggaaaaacagcctcagaatttgctctctagctccaagctactgagtcgggacttattgtaacatgatgatggggactctgtgcccattgagttttggggagcacccagtctgtctgctaggcttctcttctcttttggtcctgcccactcccagaaatgcatcatgatggacaagtgcaacaaaagttctagaagcacagggtatatgaaggtgcctcacattctttaatcctgtgatcatggcaccaggcgtttgttttataacagaccagcattctgaataacaccctacccaatgttagggtaacaaagggttaaagtggggttggtaaagcaggggagtcctcattcagaggatgatagatgtcctacctcctgctgcagtaaatgtctctggttttgaagtcctacctccactactgtgtttctgaactttcccacttctcaggggttggagaacctgagatttctgttcacacaggccaccactgaaccgtcctatgtgcctctggcacacatgaatatattgagtcattgggccagcgccaactatagcaaccagacaatagggatcaagaattgattgcctgggaaatcgtattttctacagagtcatctgtgaggggttagagaacagacctgatgagatggcctgacagagaaaaggttcccatggctgcctctggacagctatgggcatcttccctcccagacagcccatgtctctcttcccgcaggctttatatatatcacactggcctatgtctgcctggcaagtcacgaagaactgtcatcccagctgtattctgggtgaagctattctagctggctctgtgtggtaggggatctcgggaactagcatgtgatggcaacagccagcacgtttgtaacatggtcaccaggaacaaactgcgagtagggaacccaagggtatggtgctctgagtaaccaggccttctaggaagtggtgcaggcaaagttgggatgaagtctttggtagatatgatgattgttattaacaaaaatggctcagtgaacccatgttggatcccctgccttcaaagctcagacattaccctgaggcagagttcacatccttttgtgatcaagcacagactggagagcaccaacttctgagccttggagcatcaagcaacccctcccccttcacttctagggtcccttacagcttccgtggcttcccttacagcttgcctggcttcccttgcagctactctggcttcccttgcagcttgcctgggatcccaaagggagctaagtcctttgttgctgctcaagccaaaactgagccaagaaagtagactttgagatctttgtatcttcttgtgtgaggtccagcaactctgctgggtgggttagatgctgaaggggttagggaatgagcttgaggaagttaggggcctaaaaatggatggattccccaggaatggcaggtttcccagcagtcaaacctctcctgacctgcaggtcacctagcttattcctgagcagggaggggagggggaatgcctctaatgcctgtctgttcttaaaaggattggctaaatttacagcacctaatgccttttgattctgagcaggttgagggtggaaggataatgaagggtggagactatcttattgtttctaggcctacagggtgccctgtgatgtgagtgttaactttgtctctgggccaatagaccaagggagggtactgtgagcctctgggttcagagccaggtaggaccagagggagaaggaaagataggttcctcagcagaaacccctatgctttgtgctggctttttatggaagctgcagacaacactggggggaaaaaaaagaggttgggttgtaagggtctgaaggaggggaatgcagtgtagggagggtatctttacattagagggtgggtattttaaatttctaatcttaagcagtcaggtagtgaggggctgtagctgcagcatgtgtatggcccagctggaatgtgatcacagcacacagccagggatgtctcttcttcgagacagacataggtgtgcccgtcattctctctgggaattgcaagggtccctaacccctacttcgtgctatgtctgcttcagctccatccttgcctgcagccttagggtaaccccctcccttttgctgcctttacagcaaaatgcagctttagggctttttctcctactggcttttgggtcctcctcatccgtcacctggcagggaataggggcaggacaaggtcccagggactcactgcagagaccagctcctgggaggggcatctcttcatgttctgtgcctgagtgactgagttgggggtccttggttctcttctacgctctcttctctccttttccttcttgcatggtcccaaccttcttgttcactttgactttctgtgaagaccagaaccctcctcctctgtggctcctagctcagcctgctacccagctacataaggtgctcccatcactcctcactgtgacttagaagctgaattaggagcgaaagcagtggaaagatgcactcactgtggtgggagcgcccttctggccttgtagatgtggggggggggggacctgcaggtctgtgtcccaaaggattgagtaaacatagttgcacacccacgttcatagcagattctccacagccagatgtgagaacggcccacatgccagttaatggagtagtagatggtcagagtaaatacacatgatagattactgtaattcagtatctcaccagccataagagaaccttgagtgcattgtgaaataaagcaattatagaagtgttgtatgactccacataaacaaagtaccaagaataaataagtcatagagccagaaggaaggtaaggttaaccagggcccgtgcctgggcctgggcctgagcctaagcctggggaatgaaatattcgtgtgcagtggatgaagggcttcagtttgggataatgaaaagtttcagaaatggaaatgggtagtagtcatagttatagaacattgtggccatacttaaagctattgagttgtatatttgaaaaaatgtccatgtataatttaaacacagtggacaagtagctgatggacacggtataggagattgcagcgtgagagcagggagaaagacctgcctggcatctgcttgggatcttgttgcttttgggggtgagtttcccaggagtgacttcatagaagacaaggatggtatctctgtaaactatgttcctgaggagagaggatatgacaggatacaagagaggcctactgtaggtctgctcactactgtaaacaactggggcccaatctgcttaaggcctactgaatgatcacaaagctgccaccttgggattgtcatcaaaggccaaaaggtagagctatgttcctatataagatgtccctgtgaggtgctggacccttccacttccaggtcacaggactcaggtgggtcctgtaggttatctacagtctgaacagccctaagcaggtggcacctgatgccaggtgctgtcagctgtgcctggaacagattggacaacagcaactgggttagtaggggccaaaaggagcacatggataaataggtgtgcaagaatgaatgaatgaatgagtgaaaatgaataaataggtacccatggaatagtccttttttctcccctttgaaaactaaaatattgcaggatccaactgaatcacaattctttgccttacctcagtgagccaggtgggatcgttgccatgtctggtttcctcacaggacatgtgttcatgacactcatgtgcctagaggggcccacaagctgccccagcaggccaaccctacactccattctggggactccatgtcaagttcatgcaaaggcccagttctggatgtgcctagaagctctgggtaagggctgaggtcttcaaggaataacagacacagcattaggtatggactatgtcagcaggtgtctcctctgcagtccgctctagatggtggccctttggttcccctccagctcaggccagctgcacagggccaggccctgaacttgagcacattgcccttccccaggctgtactcaggcagggaataaaatgcacatttacatatctcaccactagaattaactgctcaatgggagggtagggggacagaaaactgagacatgtcctgaggacccacacaagctacctgcaagtaagaggaagggtgacaggttatagggatatagacacagtcacaccaacccctgtgaacatgggtatgttacttggcctctctgagaccatcttttcccttccaagtagtctgtttatgcgaatttcgtaaatattgggaagatgctgtgcatggggaggggtcatctatgctgagaaggctgcctcagcctgtgacataggtgcggtaaacattcacattgctattattaggaatctcatagtcatgtctgaagccacggctgggtgatccctttgcctgctagaccaccattaagcctgaagttggagagaccccagctggcgtctaggtcgctgctgtagaattccataagtggaagagggtctaggtttggaaagtagggattgaaagagtgcgggcagcaggcaatcaccctaccatcaccctttccccctgtacccccttcactttccctcccccactgctgctaccaccatcttcctactgctgtgtgaagaattaccacccccctttgggtcttgccacagcaccttctgttatcccacagttctgtaagtcaggagcctgccacccagcaggtacacacacacacacacacacacacacacacacacacacacggtctcagtgcttcagtactacagctgaacactccactgattcttggttattagcaaccaagcactcactggtgatccagaatccagaagagtgctcgagaatgtcgatgtcgacaccagttctcccattgagtgctcagggcctcacctctcttaccctgagcatcttcagatggcctgtgaagtgtccgcggcatctgctcttcagacctgctttgttattgtgcaaagggggagtctggagaaagtgcatgtagttgtgctgattgttcaagttgcatagcacttttcttgggggtcacgggtccctgggtggtgaaagagacataagacaagttttaacatacatcctttaccatcaagcctggagtccctctgtccgtgcaaggacggggtggggagcctggaagggagaagggttctggcttttcagataatggatgaagtgtgactatcagggacaaggggtggcagagggcagtggtgggtttgcgctcctatagactggggagacaattttgttggaagtctctagagctcatcccaggtacagctggttctgtctgtcaggttgaacttgagagtgggccagggggcttctgggatggtcacactcttctggaaagcgaggcagtacgtgtggcccagccacagtcacgtagataacccaccaagttttagcattccatcagtaaaaggcacccccccccgttcctatagaccaatgtagcacgtctccacagcaaggttatagaattctgctgataacctgaggcccacaggccacagcgatatatgcaacagtctgatgaccagaggggaagaaccctctcgatgggaggcatttcctgaagggattgtccctcttaaaggtgtttctatctgggatgttccaattcctacaccagggaaggtgtctattttgctctgtgtggatttaaagtcaggattttaagtcaagctggacagtaaggcttgggtgctggtctaggtttaccatctgctctcacaggcaatgagcactaacccagacaccgcacaagtcagcgtgctaggcaattagataagttacctgtgcctccctctggcctcagtttccctctcatcatagtgggaactcagcatattctatatgctaaagatcggccagaatcccactaatgtttctggcattgggagaccaaattgtttccaagagtgatgcgtatttctcaagtggggcattgtcctggcctccagcagcatctcaccgaggctgtctgtctgtcctcttcccagcagccggccccggtccctgagcccgaggaatggagaactcctcagcagcttcagcctcctctgaggcaggaagcagccgctcccaggagatcgaggagctggagcgcttcattgacagctacgtgctggagtaccaggtgcaggggctgctgaccgacaagacagagggtgacggcgagagccagaggacacagtcccatatctcccaggtgaacactggcccaggtccaagggcttctcgaactcaaaggcacggtactagggaccttaattctgactgtgttgttatcatttctcctcacgctactgtgatctcagtattggtgatctcacctgacacagcatccagaatcctggaggagagaggtttagagatccatccaggaagccttgacctctgctgagcacccttgacctttgaacccatctctgggacccaagcagaccaatgtctctgtgtcctctatgagcttatattctagagcagctctggagaccaaagctacccatcacgcatgtctttggggaactgtgactccgacttcaactacagacagttgttgggagcctaagatatgtgtcttctgtattgctctacagggtgctgtatgcctatgcacttatgtatgtgaggcattcagagaagaacctcagggtgctcccatctgccgggtcagtctgtctcaacttggccttgcaggggaggtgatcttacttggaaaactatgggctgtgatggctttagcaacctgtcatcacacacagtacatccccagtagattcttctgagagttgcttccaaatttggttctagatacccatttgaccttgtgtgaagcccccaatatcagaggctgttttcttttctcttttatttcttgnnnnnnnnnnnnnnnnnnnnnnnnnnnnnnnnnnnnnnnnnnnnnnnnnnnnnnnnnnnnnnnnnnnnnnnnnnnnnnnnnnnnnnnnnnnnnnnnnnnnnnnnnnnnnnnnnnnnnnnnnnnnnnnnnnnnnnnnnnnnnnnnnnnnnnnnnnnnnnnnnnnnnnnnnnnnnnnnnnnnnnnnnnnnnnnnnnnnnnnnnnnnnnnnnnnnnnnnnnnnnnnnnnnnnnnnnnnnnnnnnnnnnnnnnnnnnnnnnnnnnnnnnnnnnnnnnnnnnnnnnnnnnnnnnnnnnnnnnnnnnnnnnnnnnnnnnnnnnnnnnnnnnntcagcattccagggcacctcttgtagtgcccccttcaagcctgggtattcacgcaagggtaagctacttgggacccctgccgtagagaaccgccaaatgtaaccacctagctcactgcccagtaaggaggaaaatgtagtctcccactgtcttagtcagggtttctattcctgcacaaacatcatgaccaagaagcaagttggggaggagagggtttattcagcttacacttccacattgctgttcatcaccaaaggaagtcaggactggaactcacacagggtagggacttggaggcaggagctgatgcagaggccatggaagaatgctgcttactggcttgctccccctggtttgctctcggcttgctttcttagagaacccaagactaccagcccagggatggcaccacccacaatgggccctccccgattgatcactaattgagaaagtgccttacagctggatcttatggaggcatttcctcaagggaggctcctttcttgtgataactccagcttgtgtcaagttaacacacaaaaccagccagtacatccagctttttagaaaccagaatgaagccgagaccaggagtcagcctgggacatcctttattattttttttttcaaatttttctccttcatctccttcttaatgttcatttatatattttatatatatgagtacactgtagctgtctttagacacaccagaagagggcatcagatcctattacagatggtcgtgagccaccgcgtggttactgggaatcaaactcaggacctctggaagagcagaggtcagtactcctaactgctgagccatctctgcagcccagcctgggacagccttatgtagcaggagtcccctgccccatcccactgggctctggggggcagaatagagtcccctgcagttttccttagagcccttgatgttctaatgccacaagtatgtgggctcctaagcatctatcctctgaaggacctgggaggttttggaattgggagtgtgtaaaagctcaccttcctggaacttcttctcccgtgctggtgaccgtctcagccaggacggctactacacgcaactgagaagcccacagccggggctcatttgtttcttttatttgttgaagcaaagttgcagggttttttgtttgggtttttccgctttgtactatcagatggtttagtagatttaagtgcaagcattgagggagcgagagagctcttaaagggacaggacacaccccagtgcctgggtagggacttctcaagagagttgctagtttggaaaattaaagaatggtcagggtgaggtcagtaaaatggtagggaaagggatcaggtagtggataaagagcttgcataccaaacgtgggcccagaagccaagactcaaccaggagatagaatactggagcaagaggaagagactcaggttgacgaagtcaagaagggggccgcgtagacaggaggtgcagggctgagcctgggtcaggggcccctggatagatgagagaggaggaggaggaggaggaggaagaggaggaggagtcaggagagccggctggaaggaagccaaggcaggagcaatgccaggatcctggaagaaggaggatttaggaagtggggggggaggggtgggtcactttacggactgctgctggtcttggaagaggacagcatccctgacagagcaactagtggcagtggctggagaggccgcagccaagagatggataagggcagcagcgggagaccaggcttgttactgccgcttggagctcaaccaaaggggatggcgatgtggaggcattgtagagatgagggccaaaggagcgtagccggattagttaaaggcccagggtgagcggagtgggcagagcactggatctgttcacctcccagcagcccaccctgccaccacacatgcagcatgacatctgccacagagctatgggagactcccagtgactttcagccaccacagggctgcagtagagtcaggaagatggtctcagccaaggctgaaatatagtggagggaaatcagaaggaagtccagggaatgaggatagtgatgtaatcagatccccaggcaagggagggtggagtgggcaccaaggcaggtaggcaatgcgctaatgcaggggttctcaacctgggggtcgagaccccctttagggtcaaccaacccattcacaggggtcacctaagacgatcagaaaacacatatatttaattataactagtaacagtagcaaaattgcagttatgaagtaacaggagaaatcattttatggctggggcgtcaccacaacatggggagctatattaaagggtctgtgcattaggaagatcgaaagccacttctctagtggattggaggccagggactgaagctttgccggggttctggtactagacggagtgatctgggaatccaaaagaggcgtccaggagtaaaatctgttgaagatggaggggtgtaagaactcagaggaaggggatgacgtaagtccaggggtctgtggggtgagggagaagcacagaggccgacagctcagtcaactctgggacagcctgggacagcctggatctccacaagctcatgaaaggacacacacacacacacacacacacacacgcacgaacccaggaggaatacagttgtgcgacaatggggagtgacctgctgatctataaaggacttcaagatggcaggagtgtgtctgagggcatgaattgatttgtactgtttcatttcttaatttaaaccactctcttatagaattagcaatatcgtgacctgaacgataggtggggggagtgggagacatgaatcagaaaattcctaaggaaatttaatccgtttgggttgtctggggcaatgccttagtcaccgtcacttcgttgtgatgaaatgcctgacgtcagacacgtatgagaaggacttgggagatggctcagtgggtagagtgcttgccacacacggacgggtaaggacttgagtttaatccttagaaccaatgtaaagctgggcacagcagcacagatctgtaatccagggactcttccagttgtgtgagagaggagggaagggagtccgtggcgctcacagggtggcagcctcgtgcacacggtggctagcaagaagagagaaaagnnnnnnnnnnnnnnnnnnnngagagagagagagaaacattttttttaatctagaaaaaaaattatggtttcagaggttttggccatcactgagggcagggtgggaaagaacagagcagttcacattgtgaggtacaggagtagagtagtaacagaaactgccaggggcaagatacaacacacatacacacacacacacacacacacacatacagacagcagtatgtccacacacatgtgaatatgtacacacacacacacaaacacacacagcagtatgcccacacacatgtgaatatgtacacatacacacacacacacacacacacacacacacacacacacacacacacacggccaccaccacacataggcctctttcctccaacaggcccaaggtgctgccacctcccaacactgtggaatctgactccatctgtggactcagccattcatcgaatcagtgttctcatgatccgtctgcagaaatctcctcgacacacctggatgtcaggatcttctgcccgtatctaaatcaaatcaatttcaaagggaagaaatgttataccgggaaacagcctgagctggtgtccttaggctaacacctcaagctcggtggaacagacagagtgggggagggacaggcagacagacaaacagatggacagatggacgggtggatggatggatgaacagagggaaggggtctgaacaggtagtagactgtccaccggctagctctgcacttcttactgctgctagcttaggcagacttcacttagacttggacacctgcatctgagatagatccaggtagccaggcctctgcaggggctttcaatagatgtttatggtttgtagtctgagggaaactgacattcctgccattagagtgcattccttaaactttctgcatgctctgaggtttgatgggagcatgcacgcacctggcctgactgcacctggccatacagaccgtctgtatgctttagaggaagagggacttccccagagtgcctctccctgtatccataaccccccgccccagaagagagacagaggtggccggctttactcgggaccaagactagacccatcatccagagacacttttaaaaaatctgcgattgacacagctttgtaagaaatagttctgctaaatccactctgcttgtttttatttgatctgatgactgctttaaatggaatttttaaaaacacagacatacaaagaatgtctctgcctgtctgtggtgctgttttgatatttctgagggagaaatttgctaaggttcttggaaaccttgagaaagtgtgagggagtggagaatattgttcttctattggtgacgggtgtctttgaaatctgagcaatggcagtggacccttgggaagaaaatgcctcataaggcctgcacacgtgtgtccccttccctgtcccagcaacacaagaaaagttgggagaggggagtaaagtggataggttggtagatgggtacatggatggatcagtaagatgatagatagatagatagatagatagatagatagatagatagatagacagacagacagacagatggataattaggcagttttcatcgctgtgacaagatgcctagacttacttttctgtctttttttccagtcgtgatcagctgactcaccatttctggggtgtagttaaggcagaacaacatcacagagaacatggtgagagaaagctgcacactgcatggcagataggaggaagagagagacagaggaagaggctagagacagaatacacccttcaaagacacagccccaattcctccaatcaggtccttccttctgcttgtccatttaagtgtggatagatccattgatttgatcagcacctacgattacttctctaaagcctcacctttgagattacactggagaccaagccttcaaccatgaggctttggaggatatccaaaccacaacatatgaagaataggtagataatttgattaatagacagactgactgacagacagatggatggatggttgatggctggctagctgacagacagannnnnnnnnnnnnnnnnnnngtgctgccaaatgctgaggcgaggaagggtcttctttcctgtcctgggtcagcattccaggggcacctcttgtagtgcccccttcaagcctgggtattcacgcaaagggtaagctacttgggacccctgccgtagagaaccgccaaatgtaaccacctagctcactgcccagtaaggaggaaaatgtagtctcccactgtcttagtcagggtttctattcctgcacaaacatcatgaccaagaagcaagttggggaggagagggtttattcagcttacacttccacactgctgttcatcaccaaaggaagtcaggactggaactcacacagggtagggacttggaggcaggagctgatgcagaggccatggaggaatgctgcttactggcttgctccccctggtttgctctcggcttgctttcttagagaacccaagactaccagcccagggatggcaccacccacaaagagccctccccgattgatcgctaattgagaaagtgccttacagctggatctcatggaggcatttcctcaagggaggctcctttctttgtgataactccagcttgtgtcaagttgacacacaaaaccagccagtacatccagctctttagaaaccagaatgaagcccagatcaggagtcagcctgggacatcctttattattttttttcaaatttttctccttcatctccttcttaatattcatttatatattttatgtatatgagaacactgtagctgtctttagacacaccagaagagggcatcagatcctattacagatggtcgtgagccaccgcgtggttactgggaatcaaactcaggacctctggaagagcagaggtcagtactcctaactgctgagccatctctgcagcccagcctgggacagccttatgtagcaggagtcccctgccccatcccactgggctctgggggcagaatagagtcccctgcagttttccttagagtccttgatgttctaaagccacaagtatatgggctcctaagcaactatcctctgaaggacctgggaggttttggaattgggagtgtgtaaaagctcaccttcctggaacttcttctcccgtgctggtgaccgtctcagccaggacggctactacacgcaattgagaagcccacagccggggctcatttgtttcttttatttgttgaagcaaagttgcagggttttttgtttgggttttttgctttgtactatcagatggtttagtagatttaagtgcaagcattgagggagctagagagtgcccttaaagggacagaacacaccccagtgtctaagtggggacttctcaagagagttgctagtttggaaaattaaagaatggtcagggtgaggtcagtaaaatggtagggaaagggatcaggtagtagataaggagcttgcataccaaacgtgggcccagaaaccaagactcaaccaggagatagaatactggagcaagaggaagagactcaggttgatgaagccaagaagggggccgtgtagacaggaggtgcagggctgagcctgggtcaggggcccctggatagatgagagaggaggaggaggagtcaggagagccggctggaaggaagccaaggcaggagcaatgccaggatcctggaagaaggagaatttaggaagtggggggaaggggtgggtcactttagggactgctgctggtcttggaagaggacagcatccctgacagagcaactagtggcagtggctggagaggccgcagcgaagagatggataagggcagcagcgggagaccaggcttgttactgccgcttggagctcaaccaaaggggatggcgatgtggaggcattgtagagatgagggccaaaggagcgtagccggattagttaaaggcccagggtgagcggagtgggcagagcactggatctgttcacctcccagcagcccaccctgccaccacacatgcagcatgacatctgccacagagctatgggagactcccagtgactttcagccaccacagggctgcagtagagtcaggaagatggtctcagccaaggctgaaatatagtggagggaaatcagaaggaagtccagggaatgaggatagtaatgtaatcagatccccaggcaagggagggtggagtggnnnnnnnnnnnnnnnnnnnntatgaagaataggtagataatttgattaatagacagacagactgacagacagatggatggatggttgatggatggatggctggatagatggatggatggacagatagacagataaatagatggatagatgatgcaatagttgatgtcaaattgagtctagaatcacttgagagacaggcatctaggcatgcctatgagggatgtgggaaatgaaagatatggagaagcccattgtgattgtgggcaggaccattccctgggcaagaggtcctaaactagacaaagcagagagaatgagacaagcacaaacacaagtccactgctctctgttctttaccatggcgtgataggaccagctgcttcacgctccagtcacctgacctctccaccatgacaggctgtacttctaaactatgaacaagaggggaccctctcctgggggatgctcttgtcagagagtttttatcacagcggaaaaagtaatgaaagcaaatgagcaactgtatacgtgagtagcatcccagctcttccctaataccacatttaaaatcccacccgttgccaacaacattacaagccttttctcttgcacaaatgtggtgtccacacacagatacacacattctacacataaattgttaaagattgaagacttaaaaaaaaaaaaagaaaaagaatgcttattttctaatggattctgagtccccgaagtcacttcttaaaagttttccttggggccgaagagatggctcagaggttaaaagcattggctgctctttcagaggactggagttcagtcccctggtggtagctcatacattatctgtaactccagccccaagggacacagtgccctcttccagcttctgcaggcaccattcatcgtgtatacacatacacatgatcacacaaaatattcatacacgtaagataattttttaattaaaaaatgctgtcctcactccatccttagttaggagaaggacttggctttgctctgcgtgtgggaaattgagccatagacttggtaagcagtacagcactcactcttcctggccctggaggctcaccccgcccactttcttcttgttcccagctgtaatggatagagtgtcgagtggttaaggtatggagagagaattaggactcaatcttattagctcttggccctttttaggggaggtggggatgctgtggtcggaaatgcttggcgcctctgatgttggtaggcaatcaggttatattcatcagaacagcattcacaaccagccaaaccggggcacaaagatgttttaagataactcaaggtagcatttattttttcgggcatggttgtaggctctgaaacaaagtgataaacagaaccagccatgagctgtgccttgccagctcttgctttctggtaggaaggatggaaaataggggactagaaagcaggcattggtatgaaggaagaaggagaaggaagccggggctgttggaaggaggccttggagggaagatctgaaggccacgagagtgaggttacttagaaaagagtatcccatgcagtgggaatgaccaaagctgagctctggggtcagggtgtagaccacagtcaggcagagggcagtctggtagttgcctagcacagaggagatatggccagtgagctgggcatcagggcctccttaaaagcctagagagaactctgtcagtttgaaatgcagtagagtgtcccagcacatggaccttcataaaaccttgtggatagtttaaagtctgccccccccctctctctccctttttattttgagataatcttaaaagttcctatcttttacaccatgacctcaattgttaatatagcacatttactctgcctctcaatatatacttgtatatttaatacacacacatttattgcttgtaaaagaataagaagaagaacagacacacccatacatacatactcccaataggatctgtacagctgttagtctctttcatctctttcacatcatctttcacaatgcagtatctaagcggctggaaaatgggaagtctggtatggcttgtgcttccagaaccctgtcccacgtgcttggttggcttcatgcttctgggcctggagtgaagaagagaacatcccagcagaaggcatcaccagaggagagttactgtcttcctggcagtcaggaagcagagagagaaagagagagagagagagagagagagagagagagacagagacagagacagagacagagacagagacagagagacagagagagagacagagagagagacacagagacacagagagagacagagacagacagacagagacagacagagacagagacagagagatacagagagagagggggagacagacagacagacagacagagacaggaggggaccagaacaaggtgtcttctcaggcaccacccccagggagttacttcctctaacagatcacacctcccaggattaccattgtagtgtgtctaccaggcaattatccatcaggtcagggcctcagaagccagttgcctctcagcaaagagagacggctgggggcccagtcttcaacttttgagtgtttgaggaagatacttcatatccaaaccataacaataacaaaacaaacaacagaaaaaccaaatctggttagaacactgaaaccaaagctgaacattgcatttagaatcagccaccttatctatctatctatctatctatctatctatctatctatctatctatctatctacctacctacctatctatgtatctatctacctacctacctatgtatctatgtatgtatgtgtatctatctatgtatctatgtatctgtctgtctgtatgtatgtatgtatctgtctgtctgcctgtctgtctgtctgtctgtctgtctgtctctttgagttaatggcccttggctcgttctaacacttttttgatgatatattccttgtcaagctgcttaatgctactgtgccccaggatccacatgtgccaaatgaagaaaataaaagcatctagggggcttgagaaccaaatgttaatgggttgacaggtttagcagaagccctgattctgctcagaaagcctcgttgttcttgtgtttagtccgtgactatgcatgctgcaagtagcctccaactgtcttcctccctcccacccttctttccctactttctcccttctttgattcctggcacctacacaggagttttaaattttgatgtggtttgaacttgtcctgggggttttagtcaacttagaactgttcccaggaatagttttttatgtggttgttgataagtctctcctaactcctcttatggtatccaggtatggtggcacacactgtgaccccagttcttcgatggtgaagttaggaggatctgtattttgaggccagtctgcactacatgagctctttgaaaaaaaaaaaaagaacacttgccatgtgctaaggtctcactatgtgctaattgtttgtgtgtgtgtgtgattttgttcctctatcaactcaacatatggtggagtggtttgagtgtaaaatatcctccacttggtccccgccttctgttgtctgggggatatgggatcattagaaggtggagacttgctagaggatgtgcctcactgagctggcctggagatttagtagcctgaccccacttcctgctcaccctctgcttcctggtcctctgagatgggaagagtcccagccttagctcccatgctcgactccatggggatgaacagcacaccctaaagctgagagctagaacaaatccttcctctccaaattgctttgtcagcaatggtcggagtgaagaggaaagtagttaatacttgggccctgaccctgccagtcatcagtgttgatgttgggtggggctagtctgaggaagcctttgacactgaaaagtgggcatttgtatcttcactatccctgccctactctaagccttgaccttcctcctcctgctccttctactcctcctctccctcctcctcttcctcccagtgctcactgccacatggacaaccccgtccttcccaaactttgctaaaagggtatagcacatcacgggatgcaaatgactggtaactgactataactgtttgaattgtgcagtgtcttttaatgtacagtaaagaacagggagtgatgggataaactcttaagttcagaataaacatttacattccaagtgtttgtcaagtctttaaccctgtgtcctattcattccacgctttaaaattaagatataaattacaatatgtggaaggtctaaagccacagttgcacacgtatgtgcattattcccacgtgtaccattccccacatgtcctggctctttttctggatgcccttggccaggaggatggcaccccaagcccctagacagccttcatagtcgggaggtacaagatatgggcccctttgccctgaaggacagatgatccatgagcaagatttcaggcttgtgactgagtgtttgagaggaaggggcctcatctgctccagaatcaccccaacagatttagctagtttttggggtgcctaccagagctttccagacagcatctcagagggacaaaaggaaacaggcaatgcatggtattacaggagaggaaagaaaatgttatggttggcacccagccattggctgaaggagttttggaggggagttccccaggactttggggatcagggagaggcatgtgtccccatgaacaggcagccttgtaggaatgataccccaggcttctgcacaggtagaccattcaagaagtccctcaagcccagtgggtgatcaggtgattgttcatgcttggtagctccctcgggtgttagggtgatgttcagatagaaccactgtctctttcctactaggccttgggcttgtgtgggactcgctggttctgatggttctacaggctcagtcactgtgttccccttcccctacatggaacactcactttctgctgcttggccccaagctctacatcccaacctcatttccaactcaactgttattaaaaaacatggaacctggccctgacccactactcactgggccaggtctgcatctctagccactctactctggtgctgcctggctctgtccatggggaaaatggtgctgacttctatggcctgacatcagtagtatccctccaagctaccctttgtctgtctctgttttgattctgccaagctctttctttgggaaccctcagtgtgtgcttgtgggctacccgtctccttccctccgaagcccccgtgggtatcctgctcttcctcatttctgtcagacatcctcatccccttttgtactgccgctggcaaatgctctgttaggagttgctcagaagtgacttggtgggcacaacagagctatcttgctaggcctgggacagctcaccaggtggcgggctagcacacagatgtgtgtggcaccttccttggaaggagctgcactcaccagcaagtcaccactctatgggatgtcacacccacgctgttcagcagtgtctaggattcctagaaagagagacactagcaatcgccttcctcctctgctgtgtccttgcatggctccagggattcccatatggctgggatagagaacgagtgacagacagatggacacacagacacaaagctaaggttaggggtctgggctctcagatggagaaacctcagcaccccatggaagtccaccatgtttattatatagatttgaacagagcggcaagattattgctgaacaaagaggtggggttattatatacattatggtatacagctggaccaaggagatgcctttggtttaccacagtaggagcaacctcagtagaggagcagtgttcaggctgtaaacatccagcagggggagctatgacaaatactttaggcatatatggtcaacactcaacactagtcccccaaggaaggcttggccatccctttaggcctaaggctgtagggtccttggcatggcttagcctatatcaacaacacacattcactcggcttcactcagggcttccttcagagcctacactccttggttatacccacgctgacagcctcgggtggattccacccaggagaggagttgtgccaatatgtaaagcaaagacatgctcttataatgttttaaacatgatatacatacacatatcacatgtggatgtatgtatgtcttccctgaatatgtatgtgcacatacttacatgtgtatatatacttattcataatgtatatctatgtatgtcttcacatatattactttttgctttttgaaattattgtagactcgtagggaacgtgaggcagtagttccaagtgtcccctatcacccaccttcccctggtatgaacgtcttacataaccatgttgcgaggatcacagtgaagacactaacagggatccatgtgatactgattgtctagaataactcggcgtcatgtttggctgactttaggatgtagttggaacgtcactgttttgtgaacttggcttccccgggcatatacccagggactaccttggacctacaggtcacagcgatgggtttgccatcagcatgccaagtcggatttcctaatgggtctgcagggaggcaggcggagtgagggtgagcttgtgtgctgctgtcactaacccttcttttctgcctgcagtggacggctgactgcagagagcagctggatggtagctgttccttctccagagggcgagccccgccacagcaggtagggaaccagctctgtgccccatctacgagctgtcacatgtcctgcttttctgggaccttgggccgactcttgggtgactttcctaaaggatggggattaggagtaagcagaaagatgggtgcaggaaggtaggggcctctaggaagcctcccttagttcccgtgccgccttggagttgcccccaccacaacacatgggctctgaagtggctctgaagtgtatcattttatggaatgatacacatttggcaaaacctagatggcggctgagaggagggtggtgagatcgccttgtgtggtgacttatcctttcgggatactgtgtggcgacaggtgaacaaactagagtttggctcctggccttatgggcccacaagcactgggtttcttgggatttttggacctgacagtatattttgaagatcctttttctgggtctgtggaagggctgggtcagtagagcctgtggaaaaggagcttaaaggtctggcgtctccagtctatagctctcccggcatttggggctctctcctgccctgggaattctgacactgcgagtgtgtgtgacccacccagaggtcctgcggggctgtgtggcctagagggaatggagtaagttattcctggtcacctgggtgtcctacctccccagctggtctcagagatacctgtccctgcctgtgaaaaaccatgaggttaggagctgaagaaaccacttgccccaaccacgccccacttcagactctatacctcctgatcctgtcgtttcagggacatgttgcctagctcactagcttggtcccacctcagttccttgtgctacttagaagttacccgtcgctggggatgcagctcagtggtcgagcatctgcttagcatgggcagcttctaccctagcacggagaggataaaaaaatcaaaacaacgcgccccatctctaacctgttccaaaggaagatgcttagtgtccttggtccgggattatccctagggtgcatggctttgctgcatcttgtctctcccaagctgtggggaagacagctatcttcaccgttccctcttataacatttgggtcattgtttctgtctcggttgggggtttctgttgctatgataaacaccatggctaaaagtaacttgggcaggaagggatttaattcatcttacatgtctatatacagaaatatatagaaatattccttccttccttcactgagggaagtctgggcaggaactcaagccaagcaggaacctggaggcaggaaccaaggcagagataggagagggacactgctcattggcttactcagccttctgtcttacacaactcagggttacatgaccaggattagcaccacccacagtaggctgccccccccaatcaatcattaatcaagaaaatgcccaacagacttgcctataggctgatcttaggaaggcatacctacaactaagagttcctcctcccaaatgactataggtggtgtcaagttgccatgaaactaatcagcagcttatttttacaatatttatgttgattgtacagtgtttgatttgattatgacctttccactcctgcatattaaaccgtggagctgcagctctgtggcagaggggaggcagaagcctagattctggcttctcttttgctaataaacatagtggccaaattcttcctcctcagatggaaaccagaggatcctgaatgccccctgggcgtctttttttggcacctctgccccatttgcagaggggtaaactgagcacacaaagaaggaggccttgtctgagctagactgtgcaccttgcaccccagtctcttgtctgtgcttctgcggcccctgtgcagctcatgtacttcccagggaatctctgtcaccttggcctaagcgtcacagctcagtggctccgtctccagtgtctgctgtcatccccggctcttctaacagagatgacaggcttagatgtggctccaagcaggggtggggagctagacaataagaaatgcatgtttcttggtcagtaggtatctagttctggaattttccagggtaggatccttcattttcttttgtttaccaccttccctgaggctcctctctctgcctttgccctctcatcctttcgctctagaggctggggatggccctgcatggggagtcaagagtgcctggcagtaccttgtgccagtgtcagaaggcatgatgtagacttgggggacgagtgacacagggcagaaacacgggatggaagtcactgtcttcttttccctgacccaggtaggtatttagagcagtctagctattctgcaaggtcaggttggctccagcctcctctctgcttggtttgctattcttgggcatggcactcttctataacccgtgctatcccctgccatctctatcccccaccagcaggagtgccacccttcatctcatccctagaatcttgtctctcctcttggagccgccatcatgagaagactttagtacaaccaatttaaacttagctctgactagcttacaaatgaatgaaactcaggctttggctattttatttgacaattactggggaatgcggggggggggtaacccctagtctacttttctcctggcctggctaccctgtcagctgtgaggtagaccttctggtacagacttgagcattataatatatagcaacagaccaaaccacaacagaagacctctaggaaggggttagagcccatcacaaaaagccccaggtagctggcctgtggctgcccttcctggtcttggagctttggtggagaggggagcatcagctaggcatgggtatccaccctgcattagcacacccaaattcctccttactgtacttactatgtaagcaaacaccctcacactaactcatgtcaccctcaagctgttccctaaaccccacctgccccgtcagccaagcaaccccaagaaaagatgtgtcactgactctcatgtcccaagcctctaccatggggccttgcatgcactgggctcagtaacagtgctgaccctgcctggaactggccaaggctcagctatgcaagcattcccagagataccctttccttagacctcacagagtctgagctttctggagttagggttacctgggttgctgtaaacacccagttgacagttactgctaagagcaagctcctcctctgactgctgccacacctggaccactggtaccaagaaagcagaggtcatcaggagccggtgaggatggagcagggagagtgggcttacccaggcaagcatggcattgcctgaccctgaaccagaagctaggggtgggtggcacccatggggctcagccattctttgcttatttcaactcattccaaacaataccttgctctctctgggatgccttcaggcaagtcagggatagcccgcatcccataaagtgggaggaagggagtccagactaagaaaaaaaaaaaaaaaaaggagccaaccaagtgccagaaaccaggattcaaccatatctggcagtttgtcaccctgcctcctctttccactagtcattctgtgaagatgatgggacatgtcctggctgtcaccacaatggggaaacacacggtgatagctgagaggacagctcctgacaagagagaccaggggcagtgcattcagagaccttgaccatgtgcaacctggagggggtcggcaccatctgctctcacatgccaagggaaggaaataagagtataaaaagagcaacagagcttctgtctagactttagaaagccttcctgaggatttggtggcccctgacagttggctctcacgacaatggtatcattgctgggaacctgatcgacataccttcttatcagatggttgacagttcctgaagccctgggaaatctgggggagtatgagaaatgatgtcaagctatggctgatgtcccataatcccactttttctggaatgatgggtgtggtgtaggacatcccgatatgagagggaaagagccttgccctgaggtgaccctggagtaacactgttctatttacctcttccaccaataagacattggcataggtctgggtttctgtgccaacctgcaagctggtgcaaccctgacagactcaaaggatggcagatggcatctaggaggacatcaaacactccagtcccctggccctgacaacgggcagacgaaacttcatctggctaatatccagcaatggcagagtgtggtttgttgacagttaaggaattgttagtacacgtgataccttagtaaaagcacctggttccttaaatgtgtctgtgtggtagggaaaagtcctcaccaagttcgtatattgctctctgtggaattggtacttactgagcgatactggatgcttggccagagtatagctgctggagtcctctgtgtcatcgcctgcttgtaaagagtgaactcaagatgtgtacctgaggtaccctcaacagactattgtcattctaaagaatggccctgtcagtctccgggaaggacatgagaatcgatcccttcctttgggaatatgtaaagtgctccggtagatggaaagggggaaaagtggagaagggaagattagcaaaaatggagttgggcattgtattggagtgctggggtggtaggagcaagcacagctagcaaagatggctcgtgctgggtagtactagctagaggggctgatcatgatgcacgcagaggtatctggtaggctgagatgttggaactgttgtccaatcttgtcaacaaattatcttatgtttttctctgatgtgaagtcagtgccttgtgtcggtcagtacagacaagatgctgtgtaacaagcaatcccaagtcttagtaacttcaaacagcccactggaacccagctggagggtgcagttgcctttttctgagttaggatgtcactatagaaccaggctggtctaaaactcatgatcctcctgcctcagccttctaagtgctgggatcataggcatgtgccaccatgcctagcttcatagctaccacttttacccatcagcacttggagaaaagagctcagaggatcttgctttggtggcttatgccgcaggccaggtgcaccatccatttggctgtgagctgtacacagcccagcctttgaatgcgaagctctcattgccgaagaataccctttgtcgtgcctttgcttcagtgcttggtttcccacctgttgtcttcctcatagagctggtgtgtcggcaagctagctgacacaaagtttgaagtagaattccgtctcataacaggaaagcatcctcatttccatcagaaagccatttgtcatagcaggaatcagaagattctgaacagtgacagagattggtgactaatgccaaccctgagatgctcagtcaaccttcatcaaaattaaacgtgtgccctggaaaagatcacacagagaggctgaagcggtgaaccctaggcagagagtgtgtgcacagcccacatctgaccaagggcttgtagggtggagaaggaactctcagaacacattagttatcccatgagaaaggcttgaaatacatgaagagatgtttccattgaggaactgcagacaggaactgagcgtacagaagacccaccccaccccaccccaactagccctcagagaaatgcaaaccaacccgtgtgacattaccgtgctctaacagctggcgaggatgcacaggtgggggatatacaacacagccattccacatgtttgtcggtttcattaaaagaaagaaaatgaagcctttgagaaccctgtgatccagcccgtgcattcctgagtgtttgtcccagaaaaatgaaggcttatatttacactaaaacctgccctcaagtttgtggcagctttaccagagtgggaacctgagagcaccctgtgttgtctagtcttatgtcaacttgacacaagctagagtcatctgaaaggagcgagcctcaattgagaagatactccataagatctggctgtaaggcattttcttaattagtgattgatgggcaagagtctactccgttgtggacggttctatccctgggctcttggtcctgggttctacaagacaacaggctgatcaagccagttagcagtgttctcccatgacctctacttcagctgctgcccccaggttcctgcccagcttgagttcctgccctggcttcctttgatggtgaacttttgtgattgtgtaacatgaataagccctttcctctcccaacttttggccatgatgtttcatcacagcaaaagtaaccctaagagacaacccaactgttgttcttcagtgggcgagcagtcagtggtaagtggcctgtggctacgacaaagccctgggtgaatctcctgatcatgctgtgtgggaaaatcctagtcccctacggctgcacactccgagattccatgtctgtaatgttatggatgtgagaggtagttgttaagtattggagaggaagtagagtattggaaggatagggtccggtgtggccagaaagggagccacagagggagccctgtagtgatcttccctggctgaatcagtgtcagtatcttgaaggtgacaccgagttatatttttatgcatttctccatggagggaagatggagtctgtttgtattatttcttacaagcctatgccaatgtatatttcttacaagttcaaacagccgtttaaacacagcttacctttttaaagtatagagagctctgtttcttcagaatcttttgtggcgtgtcagcattgctagccgttaggaaaatgcaagctaaacccacaccgagatattatcatgctcctctcagagtggccaaggcaagtggagattctcaaagtcgggaagaagagatttggcacccgctctctccctgccagccctgggctcacctgttttaagtagacccaggctgtctgatctccattccctctgtggtttgaggctgatgctactaggagagatgcagaccagggtggagttaaagaggacttccttattcaaggaggcatattgtagggttggatggcgttgggtacagctgggaaccagggacagtaggccctattgtttcggtggagtcccgacagataactgtctaggagtggcttgtgagatggctcagcctggggtagactcagctagcacaacccacttaaagcctcagtcgcgtgcccagtcaacagatagtaactgggagggctggcctagaaggaataccttggccatgggcttcagcctgtctccacctctccctgccctttgagtggaaaaggagcaaagagagatgggcagagaggcagaaggtccgaagtgaaaggactgggtgctccttttcctcagcccagctctgattccctgctttggtcatccctgctcagcccttctccggcctcaaaggcacctctgttgtgagtattgaacatgcctggttcttttgcactggcatttgagtgctgtcctttgtgtgtgtgtgtgtgtgtgtgtgtgtgtgtgtgtgtgtgtgtgtgtgtgtggtcgcattctgcatcaagagcagaatgggctgagacggaaaggctgtgagctgctaactcacgggactgcacgtgtttctctgtagtgccgggtaccagggtctgtctgtgcagccaagcttctggctatctgacgctgccacaacactcatgagcatccagggccagggctgggtctgagggcttcccccattctgtgtgcaacagatatgctggtgaatcctataggcacacctcccaagtctctggttagagcattgccttcagcattcctggtcttaggagcatcctcctggtgtcctgtgccctgttcagccaggctctgccagatctccaaatgtgcagcctgggcttctcatcacttcccacccccactatccataaacacaacttgccacatgctgggtattcaagagagagctagcccagtggcactccactgctcatgggcctcactcctttgatctcctgtgcacacccttccatgccccaactcctaataagctgctgctacacactgacattttcataatttgctaattcagcatgtcccagatgtttgataaggagcctttttgactaccctacctctatagttccttcagagcccaaagaaataaggaccagtttctaaaggtgtgttctggaccactccatggactacattcgaactaccagcactaccctccagtgctgttctgatgcccgctagcatctgaaagcctgggagcaccccagggagctgtgtcgggggagcacctcagggagctgtgtggggagcaacccagggagctgtgccagggagtacctcagggagctgtgtggagagcaccccagggaagctgtgcctgggagcaccccagggagctgtgtcggggagcacctcagggagctgtgtggggagcaccccagggagctgtgccggggagcacctcagggagctgtgtggagagcaccccagggagctgtgtcggggagcacctcagggagctgtgcagggagcaccccagggagctgtgcggggagcaccccagggagctgtgccggggagcaccccagggagctgtgtggagagcaccccagggagctgtgccggggagcacctcagggagctgtgtggggagcaccccagggagctgtgccggggagcacctcagggagctgtgtggggagcaccccagggagctgtgccagggagcacctcagggagctgtgtggggaacatcccagggagctgtgccagggagcacctcagggagctgtgtggggagcaccccagggagctgtgccagggagcacctcagggagctgtgtggggagcaccccagggagctatgccggggagcacctcagggagttgtgccggggagcacctcagggagctgtgccggggagcacctcagggagctgttcagggagcacctcagggagctgttcagggagcaccccagggagctgtgtggagagcaccccagggagctgtaccggggcatctcagggagctgtgctggggagcaccccagggagctgtgccggggagcacctcagggagctgttcggggagcaccccagggagctgtgccaaggagcatctcagggagctgtgtggagaacaccccagggagctgtaccggggcatctcagggagctgtgctggggagcacctcagggagctatgcagggagcatttaggaaggggtcagtccccactctgaggcaggtgctgcagttctgtgcacagtgtctaaaggtctggacccacagctactcagcaagctgcagtgccgcagaactgctgagctggacccatcagagggaagacgatgctcttgtgctggaagggttgtgtagaggaagtgctcccctgtgtctctgagtgtcgggaagggtactctgtggcagagaggaaggcagtcccgtgcattcttcagcccagagtaacctctgagctgccacaaacaggatgcagtccaagccacacagcatcctttcctgttacccatgtggcagtggggaaactgagactcccataacaggagtctagaggactgcagggttaggatgtgctgggatgagctccttcgtctctgtccccagtgtgacagtcacttctctgtgcaagtcctggaatagcattgggatggcagctggctcttggtatggtgtcccagaagtcagttagccagtggagtctgtctgcagcccccaccactgtgcacttctttgatgtctgtgagaggactgaacagatgatgtatgtatacgtgtatctatgtatagtgtgtgtactgtgtatacatatgacatatggtgggtatccatatggtgtatgatgtgtgtatgtgtggtgtataagtatgacatgtgttattcatatgtatgttgtatgtggtatgcatgtatatggtatgtggtataatatgtatggtacacagtatgcatatatgtggtatatgtagtatatttttgtatggtatgtgtgtatgtatagtgtgtgtgtgtgtgcatgtgttgtgtgtgatagtgtatggtgtgtggcatgtatnnnnnnnnnnnnnnnnnnnnaaaatttattcacacatggttacgctttggggaaattatgaggggatctctcagtgtatagtgtgtgtgtgtgcatgtgttgtgtgtgatagtgtatggtgtgtggcatgtatattctgtgtggtctgtatatgtatggtgcatgataagtatatatatatggtatgtgtggtatctatattatggcatgtgaagtatatatgtatgatatatatgacacgtatatgtgtagtatgtggtgtgtatgtgtatatggtatgtacatgtatggtatatatgcatgtatagagtgtgtatgtatggtatgtaatatgtatggtatgtgtggtgtgtatatatatagatatattgttgcatatgtatatcttagggttactatgactgttatgaaactccatagccaaaagaaacttgaggaggaaaggatgtatttggcttacatttccatattactgttcatcactgaaggaaatcaagacaggaattcaaacagggcaggaacctggaggcaggagctgatgcagaggccatggagggatgctgcttgcttgcttgctccccagggcttgcttagcctgctttcttacagaacccaagacctccagctcagggatggcaccacccacaatgggtgggtcctcccctatcaatcactaattcagaaaataccctacaggcttgcctacagctggatcttatagaagcatttttttcaattgaggttccctcctctctgatgacttttatcttattgtcaagttaacataaaactatccagtattttatacacacacacacacacacacacacacacacacacatacacacacacatacacacacatacacacacacacacacacacacacatatatatacatatatatatatatataaaatgtatagatttggtatgtgtggtttatatatgtataacctgtgtgggaagtgtgtgtgtgtgtgtgtgtgtgtgtgtgtatgatgcatgtggtatgtatatgtatggtgtatatggtagatatgtgtgtgatatggggtggtatctacatatatgtgtgtggtatgtatacatatacaatcatgagtcacatagtgaagtcttagtcagcagcagactacatgtaccacactgggcccgtaaaatcatagtgaaaannnnnnnnnnnnnnnnnnnnnnnnnnnnnnnnnnnnnnnnnnnnnnctgggcccgtaaaatcatagtgaaaaggatttctgttacctagcaacgtcatagccattgttttgtctcacacaaggcatttcccacagcgctgtggcagtgcctttacgttggtactactgtggtgttcaaatcagagcccaggtcatggtgggttctgtgttacagcatgggttcatgctataactgagaacaggtcatccgcacaccagctttgctcctcacacaccagttttgtgggcagggctgtggcccctcctctatgttgtgtcagtagctgcccatatggggatatgcccctttcccctgtcctggaactcactctgtagaccaggctggctttgaactcagaaatccacctgcctctgcctcccaagtgctgggttaaaggcgtgtgccaccacgcccagctcttgggtccgtttctttagtgtcccctcccatttgacttcagtaaccacagcttagttttgctctcctgaaactttatgtaaattacatcttacaaccagtactcctttgtacttctccgcattgtctatggggtttgtttgtgcagttgtcgcttgcgtttgtttattctcactgctgtgtcatagttgaatctgtgaacatagcagctcttctgtgtggtcagctgttggcaggcgtgtgggtggctcctggcccagcattgcctcgacgatgctgctgtattcttgtgtggttgcctctagggatgtctgtacttgtttctgttgtaagtacgtgtttacgcctaggcatgacttctgtgtctccgacttgcacgatgttggacattaggcttgggggaatgatgggggccgtcagaatgaagttgggggttggagggtttgctggagtgaccagcagccagagggcagtgaccacattattgaaatggtactaagtaaagcatttcctgtctatggggtgagccatgtaagatgtctccaaggacacaggccacagtggatgaaagcaggaaatgcagccttgcttggcctggggcttctcaggaggcaaggcttaaatgattcaaaactctactcctgcatggatgcttcagcacgcctggcttattggagcccctagccagggagaaaccactgtcaccagacaggcagtggtggtgaatgccatacagtcatgcagagtgtctgaggcattgagaatgaatctcaggcttcagcagcagagatgggggcatgttgagtcccgaatacatatctccggaaacaccgtctcagtgagggcctgcacttgccacagtgtccaggcctgcagtctccacagtgtcctcctgatgctcctgctacaatattcctttaggtggctccctccagcccctagccatgcaggctagccagccttaggtgtcagcgagggccccagtggccctctcaggcttggacctactgagcctctacctagttgtttccagctggccccataagtaatgccagcccctctctttgtctctttcagaatggcaacaaggacaactccctggacatgctgggcacagatatctgggccgccaatacctttgattccttcaggtaacttcctccttttttgtcagatgtccagggctggtgtgggatctcctgccatgcatcaggacttatggggtggatctggtatggaaacagatgatgaggctggaggggaaggagagactttagcagaggctccaagaaaggaagagccaaagggcagaggtcaaagggaagataggcagactgaaggggagggggagagcagaggagggactggagacaggtgggagcacggaggaaggggcacatggctatagtgggaggcggaggtgtcacccacccacacatacacacacacccttctcaccctccagtcaacagagaagagggactgggctctgtggcccagaggtggtgtctctaaggcatgcatgaggtttgctccttagtaacacacacacagaaggcagactgactggctcagattttagaaggttcctgatggtacttgggattgaccaggctccccaggactggggacttatctctggctcttatcgctcctgctggatagtggccttgggctcatctctgtcccatcccctgagctacccaactctgggctgcctaactacaggctctccatggtgagggtcccaggatggccctgcttaccttatcctgagcaccattttgtgctcaggtgacaggtttttgtccttctcactccaacccttcttaaatgtactcatgaaacaaattgggttgttgttggggacccctacagagtgggcagctagcccacattcgggtttgggaagcatatattttcccacagcagagttgtagaaaggtgaagccctgataccttgagttccaccccaagtggggtctgaacaggtcctccctgcccactgaacctcctggctattgtgtattaagaaggcttcttgccgcatgtcttctatttgtcgccctccctcgccctctagtggtgccacctgggacctgcagcctgaaaagctggacttcacccagttccatcggaaggtccgccacacacccaagcagcccctgccacacatcgacagagaagggtaaggactggggagtaaggggggggagggaagaggtgctcttacatggagagaaataaggtgtggggagggacagggctctgttccaccacacaggggaggtgaacccatgtcctacatgtcctccctgctcagcccaggactgcaagtgtactggcttttctagagaattcctccatcctccccaccagcccatatgcctgctcctgagcagatacaagtgtctcttgtcaagtaaccgcgctcgtgggtcacctactggggcatctgggaggtttccttgaatacatctcagattcagtaggtgtgaggttcctttccctgaagctgtgcccaacctgtgattggtggacagcatgtggcttcatgccgctaaggatagctatgaatggacgcttgattcaaaagtgcacacttccttaagacactatgaggtgtgtgtgtgtgtgtgtgtgtgtgtgtgtgtgtgtacttgtgtacttggtttcaaggcttcagctgtatagacgactttgtcttgcttcagtgtcagatagttagacatatccggtagagactggacattcacacttcacacgagcccctgggatgctgaatgctgacctgcctgctgatgcaggaactccggtttgggaacccgtcccagtgcagactttactggcctgtctcacccttgttggctctgggaaccagtattacctgccttttaaaaggtgatctcagggcctgagctgccctcaggtcacgtatgtagtactagctgggcacaggcatgagacaggtagccattgctgcttttcagggttttttttttttaagtaattttttacagaagtaaagtttatgcaacataaaatcaaccactttaaactgcgatttgacataacagcgtgtttacagcactctgcaattgctgtttcagtcttcttgctgcccccatacaggatggtcacttccagtcataaccccatgtccagcccctcccctagcccctggcaaccaccaatctgctttctgtttctgtgaatttatttatttatttatttctgggtgttgtggaattggaatcatttgtgtcctttctgtctgttgtctttcctctcagtgcttttaaggtttgatcacaagcatccatggaccattcctttttttagctgagtaatactccttcgctacttgatggagttatggagcagctgagtgatactccatggagcagctgagtgatactccatggagtagctgagtgatactccatggagtagctgagtgatactccatggagtagctgagtgatactccatggagtagctgagtgatactccatggagtagctgagtgttactccatggtgccagctactccatggagtagctgagtgatactccatggtgccagctactccaccattgttgactcattcatccactgctgaagatttgggtccttacctttgggcttttataaaacctactgcttgggacattccatcatgagctggatccacttaggtccctctttatggaattgctcagccatgcgggaactctgggtaactttttcaggagctataaagtgttcccaaagctgaatatcatgtaccatcgctcacacttcttatttttcccatcctcggcctcatttgtttcccactttgggactcagttttactgttatgattttatttgctttctctcctgttcctgctgccggctcccgtctccctgttactctaacactaaacataactgacatggtgggatgtcttactgtatgccatgtgtcctctggcagctgctctgccccttcccgtccatagagaccattcctcttggtggcataagaggctctgagtagggacctggagcagcgatggtctcaccctctttaagggccagaataatgaaagacttaaataaaatacccacacaatgaggtaaaaatgagggactctagaaggtaaatactctaaggagcactatggagatatttcctgggcagctcctgtccctcctatgtgtgtcttctgggagaatgcctggtgacaccagtggggaagctgagacttgggaaatgcaggtgaccatggcactttagactgtaagtggcgaatgggtgtatcttagttagggtttactgctgtgaaagacaccatgaccaaagcaagtcttataaagggcaacatttaattggggctggcttacaggttcagaggttcagtccattatcatcaaggtgggaacatggcagcatccaggcaggcttgctgcaggaggaactgagagttctacatcttcatctgaaggctgctggcagaatactggcttccaggcagctaggatgaggggcttaacgcccatgcccacagtgacacacctactccaacagggccacaccttctaacagtgccactccctgggccgagcatatgcacaccatcacttggtacgtcagcttcactcatacataagagcagccccatcatgagcagattgtgggaggtgctgattaaaggctgcacagggaagattgtcctgtgctcaacaacgctgtcccctctaacgccagaagaccaggtcacccccgttcaccagtgcaggtcctccttctctgactaggctcacccaccaacagaagctggctcaactctaggggtggacaccctggccttggacttaccctaccactcaggatttatgagcagtgccctgtggccaccttgtggctaggacagggaactgccccgcccccccaccccccacttagccttgccatgtgaaagatggactccacgtgtccagccgctgcaacctccctcagaagcaagttgccaaggcttcccacagcctgtgttcccatagagggacagaactggagcgagccgttgccttggcaaccccactggcagcagtgactcagctggtctgcagtcactgtctgcctgccacacctgcagcttagtcggaagtttcaccttggccgggcaggctaggggtcagagctggcctctgtacactgcccactgctgacctcagactgcttaggtgaaagggcaaaggccgggcccatacgtgcttgatggagtctgcagtgggctctgagcccaactccatctggtgagttcagttcccaggcgtattttacccacaggagacctttaagagtggtagcagccattccagtggggccagtttccccagtgccttcttcctaacatctacggcctgtgcatggcatacacacagttggtgctttcccaggccagtggcacacagttggtgctttcccaggccagcccatcactgtcatgcagaatgattcgtccaaagacagctgcatgatccagccaggcctttctctgcctccttaatgtggcccagaacacaatgggtgtagtagtcagcgcctgacctttctttttctcaccttacacctgtcacaccctcctcctgccccatctgctccatctccacctgcctgagcctggaccaccccaggtacctcctcggcatgccctctgcttcaacacatactttgctctctagtgaaatgaagcccaaagcccagcttacagtataactgatttgaactcctggctttactgtgcctcccactcaatggcctgtgactttcttcatcgtcccctcaggctgtcctccctcctgccctctgtccatcacctctacaccaccacgcccctctgggttccacagcgccaccttgtgccctggatggggtactggccacagttctattgggctatttcccatcagttccctgcttgttgaaactaggtgccaggctaggcccccagccccatgtagccgtgtctaatgaaagaaaggtctgatggaggccaagttcagctccttgttttttcccacctaagcctttgctggtttggcctgtcagatttttttcatgtctaggtttacacacacacacacacacacacacacacacacacacacacacactgacacaaccaccagacttttggaattcttgtctcatgctgccctctagtggaactcaagctcatagccctaggggatgagtttccaatttactcttacttaccaagacctctagggctctaaggtgcctgtctggagccacatctggcttgttttccttgacaggaaaccagaagcgatggtagacaaatatttaaacaaatgagaaaatgactctggaatttgagttgaagctagaggtgttgtccttggggagagtcagagatgagaaacgtgcctgagactggggcagcctctgatctaggctctgattggtcccctacctgcccctcagccctgtaacagtgtgataacagtaggactggctgctgcagaagggatatacttaccttgtgctttatgttcttatcattttaatccacgaaccaggttatgatttcaggtacttttattattcctgtcccccaaatgaagcaatggaggtttacagagagagtggtttacagaatcccccgggaagggatgcatctggagttcaaactctggcagtctggtgccagcagctgtacccttaagtgggcaaaagagtgagagctttgggcagtgaactgggccagcatccccagtcagcatgcacacccatccacagagaccctgaatacagcacacacaatatagctgagtggctggcgttgccagcctgaagacaaagaaggagaaggaggctgcgctgggtttctgccatctcctgcctacctgtgtgactttgagatggttgtttggtctctctgttcactgattttttttcccttcggtacaatggggccaaatgagccggcatttttaggaattgtgggggttggggtagtcattcgctgggagcttaacagctgggcctagaagggggtatcagtgggttcatctctcaccccccccttcagatgtgtgttgcaggagggctacaggaatccaccctggagccctttccttgctgaaccatcctctcagaactgttctgtcttttgtggtctaggtgtggaaagggaaagctggaagatggagatggtatcagcctgaatgacattgagaaggtcctcccgacctggcaggtaggtcctcagccttctctgcctgggcaagcctgctggtcccttgctccagccaacgatatactacggcatgggccgtaggaacaggtgggtagaatggggactcaccagggaccagctgtgtcactgacaatgattgggacaacccaccttggtaatacaataagaacattcaaggacctgtctcttgagtgaagggacttgggctggccactactctagcttggaagtttttccccttggccggacaccacagcgggtgagcattctatagcgcactcacatgggtggaggatctatagagtgtctagtgtggcttttgaaaaatgagtttgtcctgccagctccagcacccgctgtgattgcctactctgtccttgactgtgtgtccctttcccagaatgggttcgagctctgagacaaggagggctcgctcagcagagctgatgccaataatttgagacttcagaagagacggtaggaacctaactgttccagagatggcacttaaagccatgctacccagggaagggactggagagtggggctcatctcgctccagaatctcttctctgttttaccttcattcacacactttcccatctcatcctggttttttgtcctctttcctctctgccctgccttgagcctgtcactgcgagaggctggggagttcacagtgtggccccagaacttgagtaagggtgggctggcagggtctctttccccaatctctccctgggtttacagagtttcttaaatctggagtttctgtgtttgccatattttgaaatgtgtgtgtgatgtgtgtgtgtgtgtgtgtgtgtgtgtgctgtgtgtgtatgtgatgtgtgtatgtggtgtgtgtgtgatgtgtgtatgcaatgtgtgtgatgtgtatgtgatgtgtgtgtgatgtgtgtgtccctatgtgtatgtatacagagagatgacaaaaaaaggtttccctcagttgccatctcctttattcttggagactgactgtcctagttggctttctattgctgtgataaacatcatgaccaaatgcaacttgggaaggaaagtttatttcagttaacaattctattatgaaggaagttggagcaggaacctgaaatcttgaactgaagcaaaagccatggaggagtgttgctgactggctggctcctcatagcttgctcagcctgctgcagggatgccaccacccacaatgggctaggccttcccacatcagtcatcagtgaagaaaatgctccttcagacctgctcacaggtcagtctgatggagggagttccttcattgaggatccttttcccccagatggcctgagcttttgtcaaactgataaacacaaacaaacaaacaaaccagccagcctatagaccagcctggactagcctcaactaaaccggctcgtctgcaagccccaggttgcctcccatttctacctcccccaggcgggaccatgcagagccatgcccagctttaacacagattctggagtttgaactctgaccctctggctctcacacaggcactttataaccagccactcccagcctgcacatttggaaactgttcagtgtgtgtatcctcctggtccccagtctgggctttcacatgcctgccagccccacttctcgttccccaggacttgcctgaagtctgctcgttttttaaaggtctttccccttctttctttatctggagtaacttctgctgtcctgtcctcagctcactcatcttttcctgtgatgtttaagcatgttaatcccctctggtgtgttttctctttattagaagttaccccggatctatctcttctgcccttccatctctctcgtgttttagcgtgagacgtaacttccggctgatggttgatgtccttccccacttacctatggctagaaccatcccagcctggtttgttcgtttgttttggtagagtctttccgtgtagcccaggtggcttcaaattcacggtgatcctcctgagtgtgtgccaccacacttggcttacaggttgccaatacatcagagtcaagcaaggaaggagctagggaagtggctcgctgggtgaacaagcctgccacgcaagagttcaacccctggaactcacacaaaggtgaaaggaaagaagcacacatgttctgttgcctgagcacccccacacgcaacatcatatacatgcgtacataacacacatacacacatacacacacatgcacacgcacaaacaaataagtaaattctttttccaaaacaactgcaaaaagcgtgtaaggaacaggatgtcttggtgagagaacagaagtgtcttcccttcacagcctcatcccagaaggacaggtcagcattgctctcccgtatgccaagtgctggctgtacagactgagcctgctgcatcatgggaaggcctgctcagctgcaggaccatacagaggaatccatgatttttaaaacactacaggaaattcctacatacaacacagtcagaaacctcaggtcccagctgattctgaccaacgaggctaagccactgcatgggggatctgcatttcctgtaggtctccctagactgatgctgactctgctctctagacgagagttccaggtcccagagaagcagctctgtagggaatggctgttctgagagtttgttacaaccctcgaagcactgcacagctgagggtgcctgcacaagttgtctgttggggctcccaagtgccagctacgcaggccgtggcattggcgtgtgtagggcttcccagcctggagtcacatgaggccatgcaggatgtctgggactcctagcctcagtcactgagagccaatgactggtacgcagtgaccatcaaacactttcactttcaaattgacccagaaggcgctgtgctcaagtaaagaccatggagaccaccgtataagacgggaactcatctccagcttagggaccccaagccactcttggactctccatggcatgtgttgagataaatgaacaccactagaaatccacgagctcccttccctcttgtctagagccaagaagtagataaagggggttagcctgagctcatttcctacccaccttcctcctcaagagaagacagacgctaacgtccctctagctctcttccccaacagctcctcttcccatagaggcccaagttaccgtccagtctcttgacccagcttacctccccagcctctgtcctgggctcagtctaccctccctgcagtgcagttgggccctgtccccatttgccttgatccttcatttctctttgctttccctctgcctggcatccagtttgtgcttgctctaccttataggccttgccttgctgaggtcacctcccctgtgacaccctctctgagacacagggcaagtccaccctcccagtccctcagacctctctcacccctgcaggatggttcctgccccagtgttccttctcattcgcaagtcagacactgcggggcgtgggggaggagctgtaactatatgtccttcataacccacgctcaggccatgcacaccttcataatacaaccccagtccttcttgagagaatgtcgttgaagaatgcctttctagagccacaactgtggctatctggggttacaaatcatgggagttttatctgttctgtcgtcgagcccattcccttcacccccacacccctccacactgcccccagctaagagcatcctctctcacttcctgctgatgctcttttgggtgtggtttctgggctatggcttgaaggtctttctatcatctcctgtgttaggattttataggccacaacctaatattaaccccccaaatctcagtggctgctcacacagacacaaatattacgctgagggatctaaatgtccccgagttgcctccttggggattcagggatccagtcagactctgtatgtagttttgccaccccaagggtatctaggtagccctggcagaaatagagaaaggggttcatgccctgggtcttaaatatttggtcccagaagaatcgcctggacagagttagtcacatgactccactcaactgtaaagcaatggtggggcaaggggcaggcagtgctgctcagtgtgtgcaggcgcctccaccgatcatcctctctcctcactcaactaaccttctagggcaggttctctgagccagccttttagagagaatggcatttgttcctcaggaagggcatggtcccttcaaggaagcgacaggagtaacaggccgaatgccctgttgttagagctgtaagtgccgaacagacgctggcaccttgcccaggtcacagtccctaagggtaaaagtctgtgtcctctcccaacaggcgccaccttccttcctaagctgctgtactttccaaagccttggggctccagctcagagcagaggaccccagtggccccaggcttaatgactgtggcagttctcctgggaacactggggcagggtgggtgtggcagggtgtgtgtcctcagttggagatcagatttgtcagtggccccccctggtctagcctctgtagacaaagcccagaaccctaccccttggcaatcctacctgggtgtattttcagcaagcagtggaccctagggacaatccctcttagtgccaaccatagaaattcccattgctggggctattgaggcctgtgagcctaggccctcagagatacttgtggccttggagtaagcaggtgtccatgtccagagatcacacctgcatctctaggaatcccagctataagaaagcctccccacccacaaatagcatttagtaagggccaatgtaggtgaggtttggctttgtccttccgtgtgtgtgtgtgtgtgtgtgtgtgtctgtgtgttttctgtggaggccagaggaccacctcaggtgacattcctcaggtactccttctgcttcctttgggacagggtctctcataagcttggggcatgacagctagactggctggccagtgagtcctgggaatcctcatgtctctctcctcaaagctgggattgcatctaacgtggcttctggggggggggggtgtcaaattcaggtcctcccatttgtgaggcaagcatttcacctactgagccaccttagctggtgatgtaagagtcaccaaggtctgtctccctgtggcagcggcaggggaagaagagtcggacactgggctgggtgaaagcccaaggcaggctttacagcacccactagcacctgctgctctgtgtggttcatgcctgccattgctctctaggacctctggtcaagtagaacatcagaaggcaacatgaactcagggtttagtccattctgggtggtgaaaccatagggcaaggcagagcctggggcccacatggctgggcgaatgttggggtcctgggggactttgatgtgctactgtggcactgcattatgaactgaatggcatggtctgcctgccattttcagtgcagtggacgttcagttaccatcatggagggctgcatgctgctactagagggtgttgatgcaccactctgccactagagagtgttaatgcaccactctgccactagagggtgtcagtgtaccattctgccactagagggcgttgatgcatcactctgccactagagggtgtcagtgtaccattctgccactagagggtgttgatgcatcactctgccactagagggtgtcagtgtgccattctgccactagagggtgttgatgcactactctgccactagagggtatcaatgcattattctgccactagagagtgtcagtgtgccaccctgctgtctccttgtctagctgagtgagaagccctggtccccagcagtcaaagatgtctctacaatctctcctccttatcaatgcctggtaatcagattgtcccaaaacggtcctcctcagatctcagatgagagaagtaaaagaccactcaggaccaaacatgctatgctaagatcaccaggaaccctcagatcacatggctgctacccccaggaggacagtaacacaggcaagaggaccgccttccccgggtgcctaagcatgcagggaatgcagcattgatgtgagttcgagaagctggaaaaacatcagcctctctccttggaaggacaaggactgacgaggctccagaatccaggatctgagccctccaagttcaaattcagggaaggaatgaggcctgctcctcttgcacacccctggcctcacctccgtcccattgctaaaggaagtcccagcctgggcattatcacccccaggtgtgatgacttcaggagccgtttcccttcattgctgtgagtctctgccccatcccaccccacctcagccactttagcagctatcatagagaggtaccaagctgacatgctgtccttctgatctctaatcagcccctagggtctccttcacatttccagggcacagagaggagccttgaagtcctaacttcccctttcctcccctcccccatgctcacttctctgatgccttttgtgccttctgtaaaactccaaaaagactgtgttagttgatgcatctgatgccttgcctaagtttttcctatacaagtgtgtgtgtgtgtgtgtgtgtgtgtgtgtgtgtgtgtgttgttgttgttgttgttgttgttgttgttattgtttttttttgagggtttttggtttgttgttgttttggtgttttggagacaaatctcactgtgtagcccaagctgacttcaaacttacactagctcacctccagtgtgctgggatctatagtcacgtgccactgtgcccagctagggatatgttttgtccctgtcccttggattcttcaccaggcagacggcaatgccatctgtgatttgttaggcaacgggagtgacagtacaccttacttcttcgttttgcatctcggctaggacatttgtaaactaagtcctgcgcctgtcaataattattagttggctctgatctctgtggctgagctggattagggaaactgggccaggctcttactgaacggcctgcataactaagtcaaatggaatgtcttgcctcatggatgtgcccaagacactccctgtggtggaccccaaaaatcccaagggacagtaagtagccttttgacctcgggagaatgtgtccgaagcatttattttccacacaagagaacaagaggagacagaagacacagtagagaatagtaatcagggttaagcacgcagattcgtccctcaccacacatcagatgaagactgggtgggggttatacactcacctcaccccctgggaacctgggggcaaaggcaatgtcaaaatgaaaatcatccacccataaaatgataagcaagggttcccttgattcatctaatacttggcaaagtaaaaactggtgctggggcaggagctgcctctgtcctccagcaggtggcactgttaccgtgtgataacagtggagccctctgccctgcctctgataggtatttgcggctggagtggctgtggccaactcttcagccatccagatgggaaagagtgactgtcattccctagggctgtgttgtcgctcttgcccagtcttctggaaacttccgggatctgtgaactcaggcacaggattagtaaaatatcccaaaatgcctaggcacagaagtcacatgaacaccaagcttcgtacaccccagccctgccccccacccccagccctaagcaatgctgcttctggtcacttcacagtcctgtgggaaaagcagtctgacttctttcattccgtgcacgagaactaactggatacctttgatggactgggttcaaatgcagggcctgggtaccttccctgtagatggtgcatagcattctctagtgtccccccgcagtgagagaccactgatgggtgtgtcgcaatgactaacacttgctaacatgcaccaagtgctttctggaagatacctgcctctttaatttttttaaaaatttattggctttaatctttttcatacaatatattttgatcctattcttaaccctctttactcaacttcatattcatattcatattctctctctctccaaaaggaaaaaaaaagttcacaaaaagacatggagtctgttttgtgttggccagccgctcctgggcatacagcctgccctggagtgtggcagatagatccagtgagactcagttggagaaaatggattttcactctcgtggaggtgccaattgctgggagttttgtctagtttgaacctgggcaggtcctatgtattctgtcacagtctctgtgagttctcatgtgcaatagccctgttgtgtctagaagataccgtttccttggctcttacagtcttccttctgcatagttccctggtccttgaagggaggggtttgatgaagacgtcctatttacagctgaggaggtacttctgactgagttcatttttgcagctgtcttctggtccggtgtcgccttctcagtaaggccttttgagctatgccatccctggcctccctgcctctccctctttatccttcctcttggtgtctgccacacacatgctctattgactgtatgcttctcttcattcacccactagttgttagctgcacgtaaacacagccagagggctcacggttggatgtgaatgagccccgaattgctcttgtccccagggtctcacactcactctgtaccttggtccaggacatttatctctacctcataggtgccatgaatagagcctgtatgtcctgtccctgagttctcaaagcagcctagtgacaggttcgctccatgatcattttatggtcttaccttaggattgtcacagcctggcccatttgctaatgtgaggaagaggcagggattctgcaaaccagttttctggctctaggcagcaaaggatgtgcaagttagaagtgagtgccattccttgattggcacagaggacgtggccgtcttttctgtgtggaaatgggtggagaaaataggaggaaaacacctataacagttttaaggaaggggcaaacatcagacaggtttccaaagctccccctccctgctgactgaagacgagtacctacctacgagagccccctcgcctttccattccacccttccctcagagtctcctcaattaggacaaaaaaaaaaaaaaaccaggataaaaataaaggagaccaattcatggcttcctgtctgaggccccaggtagcagggcccatggggaaccatgctagtgagtcgtgcctgttgttattttcacacttgtgagtcttttatagaaacggcagactacttgggagtcgaagacttctggtgctgacaaccaggaagggcccttgggaagaggcaactggcagagcctgaacaggttctcacaggtccttcccttcacactcccatgagaagcagaacacagggagccaggatccaaggtggcactctgatcagaagtgggtagggctggcttctagggggccaaggagcccaccatccttatatgacccacagtaaggccagggcctggcaatcttcagtccacacactaagtctaatcctcttgtccttttgttgttgttgttttgcaagttttattaccctatagcctttgctttctgtttgttcattggctgtgacagcattggtccttgtagagctgtacagccaggtcaccgccctgttgatgccaaacctacagtattttctatccagtcctttagagaagaaggttgcctggaacattaatgggaagaaagccaagacatcccccaccacggagtgtcacacacctcttctaaaatgatcctgtcagggcctccatttcttcagctgcacagtgaggatcatatacctgtgtctggcattgggaaattaggctggagtccaaggtgggagccgcacagagtcggacgggcatttgtaagttgcctttgcaaagtgcttccttaacaggcctggttctgaccagagtgaacacacagggccggcttgacaggcaaggagccattcttggaatagctggggacagaggttctcctggatttctgtggctccctcagactaagttctacaagaatgcctgccgtcagcttactaaaggggctgggagcttctcccaggcacccatatctcccaacaccctgctgactgtcattcctccccaaagctcccctctccttttggaaaccatcctgaataagtcagaccacatctgccctgggagcctccctgggcctcctaaggacttgatgctaggccagttttgagtgtgtctcatgtttcatgactcctggtgtgtttgtgcttcccagaggagggaagccttgaactcggccttggttgtaggggaggggggcggtgtcaggaagaagaggacatggcatcaaggtgaagttggccggtaatggtggagaaaggaggctgtggagagtgggggcggggccttccggaggtggttcctcgagcaccaggatcagttggtgaagggtcaggaccacatggggctcggatgttcttgagtgggatgaaagaaggctttgggaagccatggactggactctgttgagacctcctggaagaagtcactgggaatttctaccgtcatacacagctcccaggttggccattcaggtcaggtcagggtaggaactgtgaatgacagatcttgccaccactggaaaggctatctgctctgtgccctgctttgagccatgcccatagtcctttgatgaattccagaaggttctatcaggcatgagaggatgatcacaaagccagcatggtctagagagcttttgtgagaagtagagtcacaggcctaagggaggccaggctaaacactacctgcttcagggctaatgttatgacaagaacacctgccctcccctgtgctgccctgctggagggtgggtggggcttggtaagaggtggccagcagaggtgccaagcactcattgctgggaacagactatgagttggcccactaggccttacctatggggcacagaggcagtgcatcttctagccaccggtacacgagtctctgctaggagagcatctataacccatggtgggtgggtcaatctcaccatcccctgtggcctcactactcaccttatggcagtttgcaagagctagacacgcacacacgcacacacgcacgcacgcatgcatgcacgaaccactttctggtggatgctactggtggcttgggccagtttgggtaagctaggttgcatgccagtctgctctcacgtctgagacccgccaacggaaggagccctgaagctggggaaggggaaggcgtttggagagtgtgaagtatccattattcccttatgagccaggggcctgcttctggtctccttcctggcagccttaggtttgaaggcggagaagctggttgttttcatttacccaggcttctgtctccaggagcggcagtgggggcggacagggctacgtgctctccagcaggcaggcgtttgtgaatgggccccggctcccaggccagcaccagcgggcggcccccccaggacgcgcagactctcactggcttgatgtcgcttttttctggtgttgcagtagctgggtggaggaagccttcttctggcccaagaacaataccagggtcagcgcagggacctccctcctacaccctcttccttccattgtgagccgctgcacaatcccaggcctctaaggcctgcccagtcagttgggggctggtggtgtcaagtccaggagagttcagcagtgtgtgtgatggtgtggtcacctgagctggggggcttggggaagcatggggccggatcaagcatcttcggatggctaggatgttcctgtgctttgccatgggctgccagcaggatgaagcctgtggatggggcctcttctggctgacccagagagtcagagcacacttcatgcatgtatagagcaaacagggttgccccttcctcgtcactgggatgtacacattaccctaacgtgctccagcccctagctgaacacacactttcctcaactctgcctcgggttctcaaagtggggttctccttcatcagcatcagaattcccctggaaatttacagatttctaactcctgggtttctcttttctctgagtgaactagacgctcaaggttgaacccagctctgtttttacagacttcccaggggaccctcatagatgctggcgttagaacccaggacttctcacatattaaacatgctacaccctattactatatccccagccctcgtacttgtaacatcagaaccaaaaagcaaaacagcaaatgtgagtttgtttggtgggggtggggtggggtggggtgtgtgcagtgttgagacaggatttgggtatatgtagcccaggttggtcttgaagtgttcatattgctgcttcaacttgctggattataaatatgtgccccgtagcaacagctcttaataacttgctgataatttactaagtggttgctataacctaaccctgtctccctccatcagtggctaagattttgattgcttggttgtttttgtttgttttgtgtttgtggggtctttctttcttcctcttcttcatcatcatcatcatcaatttccttaaatgaaggacaaagaatcctgctgtatttgatgacctgggatggagatttgtgaagggttaggggacgcagggaggacccagccccccagtgttctgttattgattgtgttccaaatgactcctaagccttaaagccctggcagagctactagagaccagggcttcccagaggttccttattgtcggcgcagttgaagctcatctcagccgtgcgagcagcagctgggtggagagttggtggcagttggtctatacatggagggaaaccgtgtagctgttctggggagtcccttccttctgctcatgcttcgtatatgcaaatgaaccgtcttccatgtccactggatgaccaccggcagtggaagaagctgttcccaaactcatcgcctgtcagcagaaagtcctgccttcacacaccgagtggcaaacaaaagccaatccgcgagtaaaccagcaaacaaacttctgtctccaaaggaagccatcaggagttgccattaaagaggcctgagctcactgcagaaatcaagtggctggaactgaaactgcccggccttgccctctgagactctgtggtctcacttggtgagcagagggtcttactacagatactcatttcctgtctcctctatccccgccccacctcatttttcataataggctccatcatgcttctgggtccagtttgtcatgagtacatgtgtgcacaaccacacacacacacacacacacacacacacacacacacacacacacacacacacactgtccatagctgaggacttctgaaggaaggacttgtcagatgataaaagcattttatatggttgtgtgttcttcaaagacaaaggttttcccttttggctctaaaaagcttagaagacagctctgtgtagtgcgagtggtgctgcctggttcccacaaacccagacatatgtttctgtcaccgatggaggatctgatgtgccattctgctgcgattcccagaggtccaccagcctggtggggtctggtaaaaggaaaatggcagccacctcatccactgagataagaacggccctgcagcagggctctgaggattcagtgctagatgctcaccaggtccccattgctccgggaaccccagagctgttgtcataagctctatattgagcaatcagtagagcataagccagctttctgccacccatgtggcactgactgatcaggtggcctagcagctcctgtgcctcactgctaaagtgcgcattcaaattaagtgactttgagagctacatccaagttctgtggctccgactggcagttcttcccacctcagagtagtgggtagattctaaagaaggaaggaagaccttgatggccacacttcagcctctaaggctgtggttcccaacctgtgggtctcgacccctttggggaatccaaacctattcacagatgtcacctaaggccatctgaaagcacagatatttacattacaattcataacagtagcaagaatacagttatgaggtagcaaagaaaatagttttatcgttggggtcaccacaacatgaggaactggattaaagggccgcagcattacgaagactgagaaccactactctacagtatatgacccaaagagttgcagccatgtagtcctatttccaacatgctacatggttttgtaaaagttaaataactctaaaaggtgtatgtgttagttttctatcactataacaaaaatacctcataaatcaacttttttaaagcaaagatttattttaactcacagcttaaaacatagtcaactggctccatcgctgtggtaaggaggattgctggaagatgtgtggtgggtcagagccacctcccctctgtgttcttaaatatccctttacctaaacacagccaatggtccaattcaggaggtgaacatcgacagactagatattaatctatagattgtatttgaattttgccagttaacccattcatgccccttatagatgaagtttttatggcatttttttttaaaggagttgggtttttttatctttcgtttgcttggttttgctttgcttttggtttagaacccaatatcatatttggcttttcgttatcgaaaactacacaaagcatatctcttcccttcttccgcgacctcgccattttgcagtgcacagcctagttacttcctagaacgctcatcgctttgggcttgacctgtgattctccatgatcaaacgctcacacactttaaatgaatgccacggaagaggtaccttcaccttcctggtatatcagccaggaagcacagggattgtaggaagtgacgctgagcacctggccaaggcagtgactcccaggactcggcactgtggagtaacattttcccctttgtaattaagtaagtaaggagctatttgaatctgtgtagatacactgtttctgtagtacttttacccaatgaatgaatgaatgaatgaatgaacgaacaaacgaatgatttgtacctaaaacgtcatgctggctagcaaatgattttcctgctttgattttattaactgattttctaccgaaggcaacacctgcccctctcatttatctattcatctatgttggctctgcttttttttaatttgggggattataaatcattgttttgaagcacaagttgtccccaatagtgggagcctcttcaagctggctgccgtgtgtttctgaaatgtcctcatttgtcattgtcttccttccttccttctctgcacaggaggctgacccatcctatctcatgccttctctgccccagtcctagaagctacttctattcacagagatggaggactcattactggatgggttttagaagccaaggctggatatgagttgattatactgtcagggccgatgtggctttgattctctctcctctttcgtatccttcaagtccccctgaagtgaaaactgaattgcctgggtggcgtgtggaggggagtttagggttccatattcagtcatcttaaaacttgcatctactctacttcacgccccacacacccagcccatgaaccccacccctacaaactcagcacatgaaccctgtcccccccccaacaaacccagctcgtgagccccggctcccacaaacccagcctgtgatccctgccttttctggtgccaggtgccttcacgtctcaggtgtccaggttctgccagggtgtcagtcaatactccctctacaggaagccaggcagcacctgccctcactcttccagcttctcctccattcattccgtcctctgaaaattgttacaaatattcttgctctctgtgcttctgtggattttagaacttttctgctagtggatagggaaaagagaacataattgaaagaaatgtacgcagtcaacctgtctgtcatgttcaatacagtctcatttggttggaagctcaagaaagaaatttaagctgggtggtggtggcgcatgcctttaatcccagcactcaggaggcagagacaggtgcatctctgagtttgaggccagcctggtctacagagtgagttccaggaaaaacagggctacccagagaaaccctgtcttaggaagaaagaaagagggaaggagggagggaagaaaagaaggaaggaaggaaggaagaaaagaagaaggaaagggaaggaaggaaaggaaggaaattaaggttctaaagagatatctcagtcagccagccagtcaccttgcaagcatgagaacttgagcttatccacagagagccacagtagaaaacagtcctgtatggtggggtgatctggtgagcccagacagggcaatcttcctggcttacttgccagcccatttaacctactgggcatgttcggtggatagcacctgaggaacatctgaagttgacctcaggtttccctacacaagcacacaactgtgtgagtacacccgacacacatgtacccacacatgtgaacacacacagtcatacccagcacaaggaagggaagtctgaacaggagggcacaagccgtgctcaacaagggcaagtggagcaggtgattgtctgagagtcaggggttgaaatgatctgttttcttaatccagataagaaaactcacctgtggctagagtcccaggcatgttgtcatggggctaaaggataaagggagcagtctaatgtacctgatgaaggccagatgtagggtttggttttttgtttgtttgtttgtttgtttttgcctgttcttcaaaagcttgaggaaaggacacatggacccacagagacacacagatgcactcacgcacgcatgcacacaggaatgcacacaagcacacaacagttttacgaatcagtagaacaacacacaaggcagaatgagagccatcaaccatctgtctgcggtccctgggaagatctaggctatgaccttacaaatgttgagactgaacccaagaactgccaggatacaggtacctagggacccaatgacagtactcttaggattccagccatcccttacctacctttgaacttgacctccttagtagtaagactcctggcagcatgccttgagagtcccgagcactgggttctagtcctaaaacacccctgtcaagggatgaagctctcaactgatgctctctccatactgaacccaggaaatcaccagataggtgttagaggaagtgagcaaactgactgtaaagaatttaggagagcgccgccaccccagaaaagctactctcgcagattcccaggcctggggacatcactagcctcttccacggccacctgggactctccccatcggtgtcactaagaaacatggtccctacccatccccgtgggcggcctggccccagaaggcctcatctaaagtgcaagctgccctgagaaccacatgtgtagaacttctaataactttagtcttcctacttgagagttcctcccatctggaaatgtttaaatgagccaggatacccttaagtcagattggcgatctaccctggaataacacgtcataacctagtgctcggggcagtcacctgagaacttgaggtgctgacagaggactcttaagtagccggaagggcaaggactatgggaatggccctagttcctgaaaatacttcatttccagctagttgcttggaagggtttgacctatgaacgttgtcatctgggatgttggtatgtgagctggaaacgtgttaggctaggttggcctatatggattggagaggaagggctaagggtaggaagtcaaggctgagtacctggacaagctgcagagaacatggagaacttggctaccccagcctggtggccaggcaaaggagcggctgttgctctgccgtgtagtgaagaggtgacatttttttagacgtgcatcctgaagacagtctggccattagcactcttagcacatcatctaaagaaggaaacagggctctaataagtaagggctgtccccaagaccacacagctagtctgcgcacagatttggggcccggggtctctgctccactatgtctctcaaacagcgtaccatttcatttatgattctagatgtatggtcgttgaaaggggctcacaggacatctgtttaataattcattctagaatttctgagggatcgtgatcaagtaggtgcctttgaaaagatttcagcacataaaatgttccgtagagaggaaagcaaggggggaaaaaaaagacagggaaaaaaatctcgctgtcacctctgcaagtttcccctctctccgtgaaccgggtaccgccctgcgcatgagccccaagcgcaaatactaaggggagccgctgacaggcagtccccacccgaaaccagggtctccctgggacccctccttaggtctcatgtgctgagggctcacacagaaggtcagcatggaagacgcagtcataaaaacacttttaagaaatggttcttttctgcattgccgttgcaatgacagcctgcgccgtgagccgttccaagtctctcttgtagcgcttcacgctgtgccgctggggatgctgggaagaaagacatgtggtccctggtcaatatggaaacactgtatatacagttttctttcattaatactcttaacaacctgtgcatgaagttgtcaatgagttcggcttgtggcccagagaccccagctctctcagggttgtgtgaagtttggatgtgcagtgtcctggtcccccttctaagccgatgaagtttgagtcggatatccaagccacttaactcatttttctagaaagctgcatctggagattagggcatgtctggctgagaaggaaaaccttgtcttggaacatatctgccagccaagaaggcagaacacccactattccctcagggtgagggagtcacaagatcataaagatctgtaccgggaaggacccttcagagtcacctagtgccatgctgttctttaaaaaaaaaaaaaaaaaaaatccaggttaactttttattatttaaaaagttgtttttttacttatattttggtcatactgtttcctcccccccccccccaactcctccctgatcctccctacctcctctctctctctctctctctctctttctctctctctctctcaaaatgcaaaacaagaacaagccaaaaacaataaaacaaaacaaaaaaaagtacccacagcaaaacatgtaatctcgtttgttgttgttgttgtttgttgttgttgttgttggcagctactcctgagaatggggcctgctctgaagtaaggctgagctgtctatggcatttcactggaaaaactggtttcccctctcccggcaagcataggttgccaaaggatccttggttagggtgtggctttgtgtccactcccccttcttggtgctggggtatttgtccggattgaactggtgcaggcaggtcttacacatgccgcacgccgtcacagtctctgtgagctcatatgtgcatcagctctgttgtgtctggaagatgctgtttccttagagtccctcctctggctcttgctatctttccagctcctcttctgcaaaaatccctgagcattgggagctgggggaggggtggggtaggtgttgatgaaggcaccccatttagggctggatgctccagtctctcacgctctgcacattgcccagttgtgggccttctgctaattaccatttactgcaagagggaacttctctggtgagggttgagtaaaaacattgatctatgggtctagcaatatgtaaccaggagtcattttattaatatgtttctttaacagggtgatagtagtaagtttccccctagggcccatgatctctctagcctcaggttcttggccagtttagcagaatcagtatcggatatgggtttcattttatgggcctctaaaaagctagttttagacagacaatcagacagacatggttgaccccaaaacatatgtgccactattgcaccaggatatcttgtgggcaagccactatattatgcagggtttaaagctgggtaagactaactgttctttttctcctctggttgtgtacagagtaccttctagccctgtgaatgttagttagtaccagttggatttccatgtctttaataatataactaaatgctatactcagcaataaagccttaaacatcagattgtggggaacaaccaacagctcctttaaaagcatgttatatttgggggatgggatctagggcaccccatccattcgtttttgaagctggaaaaattgaagcccagacagctgctactcggagcccagagcatctgttctccccagtcctgagcagatgaccaatttctggaatctgtggtggatcagaggtcactctgcacttgaagaggcagccagaagtcaaaggagtttagcacagcggagatgtgcaagacaaagaggctgccaggattctgaggttcctgagcgctcagcctggccacagcagttcacctcattcacctgcctcagatgatgtcatcaccttagaagcatattctttttatggaagcctaagtcagattgtgtgcacaagttagcactctaaggttctcttgaaggaattcattacaagatcctgagttgaaagttgtccgtaggaagcaaaaagcttgtgataaagccctgtgccatggcctataaattctacctgacccagctgataacataatggttaagctggccaaaggctgcctgtgtgagggataatggttgctgttctattcatatgacacacacatacagagggggaaggagggagggagagagagagctccccaaccaagatcccatgggtgtgttttacaaacacaccgaaaatgcccggaaagcccattgtggtttttgtaccctccagatcattatttcagcatactcgccaggtcaaatagaaacattcacttggcaagaaaggaaaagatgtccctttctgtggtcctcctgccaacaccaagaggagcattgttctgtcaggctggcgtgtggtgagtcaacccggtgcatccctcccttccacggggtcctttgaggacacccgaagggcagcagccttgggggctggcccacaggtgaggctttccctttcctgaaggaggatggttgaatacaagagccagagaagacaaccccacagagagggacaccggatggtttgaatccccactgtagaaggggttcacatcatagaaaagggatcaagatacaaacttctaaagattccagtactgtgtgtggcttttgtcttgtttggattagtcacacccagctttgagtgacacttgctatttgtctcctttaggaaatcaggctgtgtcagagcaggggctgggtctgatttgtctcttactttctgaaccaggtctttacccacctttgtctctaaatagtcttctcctcacccattcctaggctgcccatcctccatctcctgctgcctccgtcttctaatctctggccatcgtcaaggccacctggtatgcgtttgggtcctgtcctgatcaatctactccatgtgatttacaaagggcacttacccaaccctttggctggtctgttccatcttggccttgcctcccaccccgcatcccccgccacaggaccaatctcccattgtgcatgtcatcccatatccaccccatctctcttgtccagctttggggaccacatctttcctctcttataccctactcaatggccacactggactcctgtgagaccccatctacagctgcaacacatcctaacctggtacctggcacaaggattggcagtggaagacaaaccctagcaaacacatgtgtaagcaactctggtccggcctacaccaccctagggtcccaagggttgaattcggccctaacctgtctcttctaaactgggactcattgacaaactacttagacttcccttttgttgtgttgagaacgggatggcaaaatcttcctgcaagctgctatcactgatagctatcataagaatcaagcaaggtgcctgggagagtctttgaaagcaaccagacacttgtacaatctcagggcttccgtgtgagcatcagtgagttcagggcagctccctggggtctcctgggaaccactcacatccagctctgtgcacgtgcttacaagcagaccaaacacactagtggtaacgtgggcctcttccctctgcatttttataaagtgaatcgggcgaaggaaatgtctaggaatagacagtcttcctcaactcccccaaaataactccagtggaaacaatcgtggtaacattcactctgatgtattgtttccagccttctgcaatatgggaaaagttctcccgtcacttccaactcaactgggaatcaactggacttccagagaggcctggaaacaaaggggactgagcctgagggctgccctggtgtcagggcctgctggtgctagacaatcccaaggctgtgtacacgtttcttcttcctctctccttccctttggggacatgttggcttgacgcctttggattttcccatggataacgtctgggggacattatcagaggcatttattagaactgcacatggttgtttagagcttcctctgactatacagaccagagctctcagtggcaccgtgaccccctacacacacaccaacccagtctgcctgccttcctgccaggcctttgcctacatagtcccgtgcaaactctaggcctgatcaaggccgagcccaccgtccacctccttgctgcctaccgtgctgatctgcccacaccaaaggaacagcagcacctttacgtcagtttccctccactgccctttccctgacctctgaagcatccatggccttccacaggcctgggagacagataagactgaaagctttttcttccctttccttcttccatttactgccccttgcagagcgcccaaaattctccagaactctgttcttatcaccacagcctttcaaaaacaaaaacaaaacaaaacaaaacaaaacaaaaaaaaactcaacttgtcgtgtgtgtaaatgcagtttaacttatgtttaccattataaaagccatgttaaacccttttcctatttcttgttacacacatatacacacatttacgtgcatgctcaacacacatacacgacatacacacatacaccatacacacacacatatacacatgcatacacaaacatatacaccacacacacatgcacacatttatgtgcatgctcgacacacatacatacacacaaacacatataccatatatacacacacatacacacatgcatacacacacatacacacatgtacacatacaccatccatacacaaacatatacacatatgcctacacacacagacatacacacatgcatacacaaacatatacaccacacacacacacacacatagatctagttctttcttgtctctgaagccttccttaattcttctagccacaacctctctgcttctgactctgccactcttcagagtctctgttgtctcccttttctaagaaagcgtccccgactactctgatggaatattgctggaatcttcgcttgtttcagcgtacaggacctatcctccctcatcacatttcccactctggagcacatccacatagcaagtgnnnnnnnnnnnnnnnnnnnnnnnnnnnnnnnnnnnnnnnnnnnnnnnnnnnnnnnnnnnnnnnnnnnnnnnnnnnnnnnnnnnnnnnnnnnnnnnnnnnnnnnnnnnnnnnnnnnnnnnnnnnnnnnnnnnnnnnnnnnnnnnnnnnnnnnnnnnnnnnnnnnnnnnnnnnnnnnnnnnnnnnnnnnnnnnnnnnnnnnnnnnnnnnnnnnnnnnnnnnnnnnnnnnnnnnnnnnnnnnnnnnnnnnnnnnnnnnnnnnnnnnnnnnnnnnnnnnnnnnnnnnnnnnnnnnnnnnnnnnnnnnnnnnnnnnnnnnnnnnnnnnnnnnnnnnnnnnnnnnnnnnnnnnnnnnnnnnnnnnnnnnnnnnnnnnnnnnnnnnnnnnnnnnnnnnnnnnnnnnnnnnnnnnnnnnnnnnnnnnnnnnnnnnnnnnnnnnnnnnnnnnnnnnnnnnnnnnnnnnnnnnnnnnnnnnnnnnnnnnnnnnnnnnnnnnnnnnnnnnnnnnnnnnnnnnnnnnnnnnnnnnnnnnnnnnnnnnnnnnnnnnnnnnnnnnnnnnnnnnnnnnnnnnnnnnnnnnnnnnnnnnnnnnnnnnnnnnnnnnnnnnnnnnnnnnnnnnnnnnnnnnnnnnnnnnnnnnnnnnnnnnnnnnnnnnnnnnnnnnnnnnnnnnnnnnnnnnnnnnnnnnnnnnnnnnnnnnnnnnnnnnnnnnnnnnnnnnnnnnnnnnnnnnnnnnnnnnnnnnnnnnnnnnnnnnnnnnnnnnnnnnnnnnnnnnnnnnnnnnnnnnnnnnnnnnnnnnnnnnnnnnnnnnnnnnnnnnnnnnnnnnnnnnnnnnnnnnnnnnnnnnnnnnnnnnnnnnnnnnnnnnnnnnnnnnnnnnnnnnnnnnnnnnnnnnnnnnnnnnnnnnnnnnnnnnnnnnnnnnnnnnnnnnnnnnnnnnnnnnnnnnnnnnnnnnnnnnnnnnnnnnnnnnnnnnnnnnnnnnnnnnnnnnnnnnnnnnnnnnnnnnnnnnnnnnnnnnnnnnnnnnnnnnnnnnnnnnnnnnnnnnnnnnnnnnnnnnnnnnnnnnnnnnnnnnnnnnnnnnnnnnnnnnnnnnnnnnnnnnnnnnnnnnnnnnnnnnnnnnnnnnnnnnnnnnnnnnnnnnnnnnnnnnnnnnnnnnnnnnnnnnnnnnnnnnnnnnnnnnnnnnnnnnnnnnnnnnnnnnnnnnnnnnnnnnnnnnnnnnnnnnnnnnnnnnnnnnnnnnnnnnnnnnnnnnnnnnnnnnnnnnnnnnnnnnnnnnnnnnnnnnnnnnnnnnnnnnnnnnnnnnnnnnnnnnnnnnnnnnnnnnnnnnnnnnnnnnnnnnnnnnnnnnnnnnnnnnnnnnnnnnnnnnnnnnnnnnnnnnnnnnnnnnnnnnnnnnnnnnnnnnnnnnnnnnnnnnnnnnnnnnnnnnnnnnnnnnnnnnnnnnnnnnnnnnnnnnnnnnnnnnnnnnnnnnnnnnnnnnnnnnnnnnnnnnnnnnnnnnnnnnnnnnnnnnnnnnnnnnnnnnnnnnnnnnnnnnnnnnnnnnnnnnnnnnnnnnnnnnnnnnnnnnnnnnnnnnnnnnnnnnnnnnnnnnnnnnnnnnnnnnnnnnnnnnnnnnnnnnnnnnnnnnnnnnnnnnnnnnnnnnnnnnnnnnnnnnnnnnnnnnnnnnnnnnnnnnnnnnnnnnnnnnnnnnnnnnnnnnnnnnnnnnnnnnnnnnnnnnnnnnnnnnnnnnnnnnnnnnnnnnnnnnnnnnnnnnnnnnnnnnnnnnnnnnnnnnnnnnnnnnnnnnnnnnnnnnnnnnnnnnnnnnnnnnnnnnnnnnnnnnnnnnnnnnnnnnnnnnnnnnnnnnnnnnnnnnnnnnnnnnnnnnnnnnnnnnnnnnnnnnnnnnnnnnnnnnnnggtagagagggaagcccaactgctgtagagagcacttagcttcctagctggtccccagaagtggggccagcagaacctgacctggacccgaactccactttctgccaggctttataaagttttattggaccccagccacccttccctgctgctcttgctataggatgggaaaattgagttgttgtgacagagaccatatggcctgcagagcctaaaatagttagtctctggctttttacaggaaaagtctgccaacccctgctctagagggggaccctgcatagactccccggctgcagtttgcacattgacatggctcatatgctggggaagttttagaccattctctaggctctttataattttttagtggcccttaaggcagagctgatagagagaggaatggtggtcttggagaaccccagtgggctttatgtgagccgccatctgctctgtggcctcccagtagagaattagggggtccccaaatcagaccaacatagactgtggaagttagtagcttgggctggggctgggctctgtacctcccaccgggatgatagaatatggcagaggcaggaccataggactatactgagcagggcctagggatgcagggcagtgccagcagacaccagaaggccaagcttcaatatcctgagcacaagttctcagattctcctttctttcttcttgcgccaccatggtgcccctgaaagtaggtcagatcactgtctgctccagccacacggagggaaatagacaccaagtaggtcacggggctgctactgcctagtaagcctgcgggctcaacccaatggcttccctgacacagatcacccagcaagacccctttcacatgtccgagactccctaatggcccactcccgcatgacaaaaggtcaggcttgctttctgggaaggaacaaatgctgactttctgacatggtcagcgcaccctagtctgaagaaagaaacaatccttatccttaaaatatctggcttcactgaggagttaacacatcgaggcagttgcttaacatcccaaagacatttggcataggacttctggtcaaagcacagctttgtgtagctctgtgttggcgtgcaacactgggttaagacctttacggatcatgtatctttcttcctaactggaaactgtcttaggatccatacttcttaatttgggtaggttccttggttgggggtaggggttgttttgctttgttttggacaaccccctggtcagggaggtccagtattttctcccagcattgactataattcatttagcccactggcatcttaatgtagaagaagagacatgcagtaaacagagggcccagaatagcagccccgtggatgtgtgtttcctgtaccataactgcttccagagtggagacccacagttgcactctattgccactccagaccttggtgaacaccgtcttcatcacttccccattctgtcagctgacaattgctgagcccctgctatgttagttgctgttgggagctcaggtccctcccttgacttctggatgggttcctattgtggtttgcagagtgtggtgactgttcttatgtttgatgctgagctatgggcagatcggctcttgtgtattagaagagttggcaccctggttccatcctttgcttgtatgcctttagcacgtctgcttaataaagcccgtctccttttctacccctgttgggagtggatcatgacagcacccttcccttcagagctattgggaggcttaatttatctcatccatgcaatgcacaatacctcagtgtacagaagtcagtgtgattagcactgtaacagcttggattccgtgcaggcatcccgtttctcctgtctgagtatcttccaggagaaattgctccctcggtaagcagaagggcgggtatttatcaggcatgctgtaggggaaggaaagagctggcaatctagcttcccctcattgtcaaggccactcctctgcacgtgcgactcgacttaaggatgtctgagcacaaggatagctttgttgtctccttgtcttctggccgccctgcagtgacccacaaagtagctattgaaaaagtcaagggacagagcaaacaggttttgtcccgcacgatgaagctgttctttgctctccaactataatctcagctatcagttggaagatttccacagaatgtctatagcattcacctcgtgagtctgtggatagagctaagggttcagacaaggaagctaggacccccggagtctccagagtcctccagttttatctaggctgtaagtcctagctacaattgatctccaccccagccatttcgcgccaataaagaatacaaatccgggacagagagcaagagttctctgcactttataatcagagacaaccaagtggagaccaatgaggggaacaccagttgatgcctgactttcagtcccagtttgagcttgagcactgtgcctttcaccatcaggcctccaatctcactatgccgaacctatgttacttgcacagacacgccagatcaattcttccctttgtggacactgacaccatagtatatttggctttagctccatggacctctggtacccttgggctattctctctatgggcagagttggccaagagcacagcacatcacctgcttccatctctagcaccttacttcttcttcacaatgaagggccagtatcaggttctctattcttaacagaggacaccagctcagagggaggatgcctaaccaggcctgtctgctgctttgcacccaggacttgctcagaaaatggagacatttattataagacagaggacacacggagttgatctgtgggcgtgccctttccccctgcatgccagtgaatggccaccttggtcctcaaaggtcttacggtctgaggataaaggagccagacagccaccatcattcctgtttaacagaagagattgcctttgttaagcacccagctgtatattagaaggttgagagctgatgggaccgtcaaagatctaacttcttacaaagctagaaatagaaatagtgccttgcgtaccatagactgtggatccctggatccctaggttacctgtaagtgttcttagtccctatagacgggacagggataggcccaatctggctcatccagggctatccattgtcttaacttcttttcagaagtagttctgaagatctacagtgtgtaaggccctatgtagacatcatgagcattcacgtaaaggaaacatagccctgaactgctgtatgtttacacatctttgctagggaggtgagtgtgtcagcaattacctagacaattcagaccacggatggagccttaaggagtctgcccagatgctgtgaccacatggactcatgggaattcgagccagctttggagggcaggaacattgtgctaaggggcaaaagctgagcctttgggaaggctggatgcctcaagtaaagaaagagaaacgttttctatggtggagtgactgagaggtgtggaggtccctggagatccctggctggcagtaggttcctcgaaactccactgcagacactgctgcatcctggccccagcccagctcttcttctgctgtgtttccatcaagagagcttgaagtggctctccaggccagcgggatgaaagcggccgctggagctttcctcctgggtggtctgctcctgagataagacccatgaatggtgggggtctgaagaatcacatcctccaagtgaggatgatcacctctccagccggaaaagctgtgtggcagcggggaatgtcagctgtgccatcccagcagcccaccccagtccctctacctgctgtctggtcccatcccttaaaaccagggtgtacgtgctctggccttgcaaatcaagctggaaacactgcatggagagcagaggtcagtggctggatggtgacacctctcctccccaagtccaacctacagagccatcaggagagtgggggaaaaggggagagagaaaggaggaaaaggagggggaggaggaggaggagaagaagaagaagaagaagaagaagaagaagaagaagaagaagaagaagaagaagaagaagaagaagaagaagaagaagaaaagagaaggaatcaggggcacccctgatgaccttgtcaatgagggaaactgtcagcccacgaggggaaggtgacagacaacaggagagtttctactggactgaaatctatcacaagagatagcccagctgcaggatagccctggaagggtttgggactggagcaggactcttttttcatgtggcttgggggagggacaattaaattgtaaggagcaactggcatctcagggttgtatggtcatggatcaatcagtggctacacaaagcagttataatgtgatgagtggtccaagtggtaaggcgataactggggatagaagaattgatgagcaaatgagcggaaaaaaaaaatgccctgtgtgcactaatagcatatgaagaattacttaaagaactgtatccagcactgctcatcttgactaactgccatgagaaaaaaactctttttttttcagtgtgtgtctgaatagatgtgggtacttgattttcataacaagaaagtccaggtcgatggtaaggtccattcctgaggcgagcccaaccagatagcttttctttaggtttgcagtatgagagaaattgcagcttcacagtggcctggagcttagtgaaaatggttactgatcatcaaaatggcttttggaagtcctctgatggttcacagtgcaatgctaatatgtgtgagggtgcaccctgctgcacgagtgtataaagcccatcaaagacctgtgtgctcgttcatccgactctctgtaggtgaatttgagtgaagtagacatgcacttggccaagatgttgtcaagaatgctcttcccacagagccagtcctagaccatggaaaggccatcttcattttgaagctaagtccttcaggatgtccttgggcaaagctgagaccacccattcccagttttcgaagttttttggactataagattttaaatgtcagagactacaaatccagtataaattggaaaaaaaaatattaaagaaacaggtttacatagagtgaagaataagaagagcaagacggatccatttgacactttaaactgttatgttttattttattatgattgtgtgcattgatgtgggtatgcacatatctcacagaacatgtatagcagtgagagccagctcctccttccaccacgggctccaggatggatctcacaccttcaaggcttgaataataagccatctcactggggccctactgatagtttagtctcctcctctttctggtcttgagtaactttcttcagcctcctctggtccatcatgccttcacagctgctcctcagtgcacttcctgtttaaatgatgtcctttgaatgggtgcagcctctgagctgttaatgctcaccccctaccaaagagcggacgtccttagcccgactcactggtgcatctagtgaggattttggtaccttgtgggcctcattcattgcccgagtagatccgaacaccactggttctggatcaaggaactgccttttagtcctctcgtactcccgccgctacctgccagtgccagcactgagcctgtccccgtgggtcctcagtcaagcctagtagaaagctgaaagctgtctcctctataacgctcagcattagaagcatcagaagcagctcgctgtcaaggattctgcactggccatgggtaagtaaggttcatacataccttgggctgaaggttttcctgacccaggtgttctatgtatagttggggcattcttgggccaggaaatcaaagaaccttatagtccagtcttaatcttcataattctctgaggtgggccttcagtacttccccctcgctagctgagggcaacagaaggatgagcgaagtgtttccatccaggtacccatggtaagaggcacagatgaggttaaactagactgttgacccttgacccccattcaggtagccccaaatctgcactggggaagccattgcttcactactcatcatgaacacgctcaaggccaaatcagtccatgctggcttggggccccactgcccttgggtaccccgatgtcatgtgtctcatcccattattcagacctctctccggcggcctctgactagccagctttgacttaccagggcagaaacatgatagccatcatcaggttctttcatgttgagcattagtggtgcatccttccataatggggtacaccttatgctcagcctgtctggtgaggacatagctcaggcaagtgcttctttttgtggggaccctttacctcaggaactctggtgactgctagtttgtatggtaagctacacagtaggctatgctcagaaggagtcaagctgggagcaccctgacctcgttcgttgcttcccccactcgcaacccctcccctacccccatctgtggctataaacaaagatatttggcctcctgggacctgtggatttctttgagagagctaggctctcctgtatctccgcctcacagggcatctcaagcatctatggactggccacctctcttctgtagctgctgctacttctgtccctcaggtggactctgaacctccctggggggggggctcatcccatttttcacaatggcacctgcctctcagagactggcattgtcctctggcagctagagtctgtcttcttgtcctctcctgggcttcccttatgttcttctccagatctgaggttctctctttctgccacagacataccattcagttaggggccaaacctcaggacacctgtacatcagctccacccagagagcactcttaggctgcagaacagaactgtggcagcctatggctctacagttcctgagcccttcctgctttgctgtgtcattgctgtcccttttgatcaaggcatgcttccaggatccttgtggatgctgcatgtcctgaaagtagagggcacctatctgggtcccttcccatgtcggagtcaccagaaccatcctgaacccagatggactgcatcctggaagatacgggactcttagtcttgggctcatcccctaaaggaggtctgaagcctctttggtctttgacccagaatcataggcatcctttcagggccccttcccacacagacaccttctccacactccccagttgcagatagaccctgtcaatcatacttactaatcacttctttgactttccatggtatataatacagaaccaaccttccaccattaaccagatagttcgtggcccctgccctttgcaaggatatctctgcctagtatttgctttatttagaaattaataagtaaaaaaaaaaaaaaaggtcatttgtatctgaattacgcagtgaattgtgctggcatggttgcccctgcgggacagaaaggaaggggtcgttcgtgttttgttaacattgtacggacacaacgaggttagccactacacctaaagttgtgccatgttgaattagtaaaactttttttttggttgtgagtaacagaaagccagttcaaaatattttaaaggtagaaggatcttcaagctcttgactcaaaagagagcttcgtagtcacagcaaaggagagaggaaaggcaagattttcctctgttgtgtaaaaaagacagacaggagctgcatgagtcactgctctgcgatgtctaagcttagcagttgtcaaaaccttggccacctaaaaggtgtgtgcagtatcttatgttggctgtatccttaaggaatgaaagtttgatggcaaagcaggaggaggttcttgtctttggagatctgaataagtcggctttctgtgactataacaaataactcagaagtaaccagcttacgaagagaaaaggtttgtctgggctgacgggtttcgttgttttggtttatgattggactgttctcgtggcttccggttgtggtgaggcagcatagcattgctagcacgactttctcacatgtgtggagtgctttcttcctacttgcagattcggcacagagagggagaaagataacagacctatgggaaaattcggctgtagtgactccagtgaacccatatccatgctcagcgggcatttacctaataaccaggtgtaaaagagaggaagtgtagggtcctactgttcccttcagagccttgtcctcgatgacctatgacctcctcctagactccttcctcttaaaaggttctaccacctcccagttgcatcgagctgtgatcaaaaccagatctagatggtagcagtgtctaaagatgtcttgcatagagaacccagctctagaacgaggccagactgcccgagtgccagttttgctgtgggttcttaccaaggttcagccaggaatgaaataaccacgtgcaatttcaggaagatcccaggctccatgggaaacctgaccagaatatgtcagttacacacctcgtctaaaaaaaaaagtgttctgcgcttactgcggagctgctatgcagtgtgtgtcggtggtgggtggaaaaggttcatgcttcagggtacatgggagggatgagatgacaggagcggctacagagctctgagcagcctctgggtctcatccctccctgcttttatctatgtttttatattgaaactccagctaaggtattgttgttttaaagggtctccactgattagaaaaaataaattatgagaaaattgccaatttaaacatcgcaagcaggccttcccctccatccttctctctgaagcatgtcggtttctctaaatagctgcacagtctagagattccaggaattttagaagcattacctgtttatttctgttgggacgtgacccacacatcctgccagtgtggaggcagaccttgatagggcaacttcttagaagcaatgggaaaacatagctcccagcgggaggaagcctctgtcctcagaggagcagtgctgagatctctctggccctttgagttcccaaaggcttcaaggatcctttggagtgctaacctttgcaacatctctggctagagctagggatggaacccatctgagaagcctggaaatggtagcccatcccccacccccataccccaacagaatgtgccctggctccctgaggctcgtgttccctcctttgcccagaaggcatgggagacctaaagtctatttggctattccatactgagcactcaagccctcccaacatgccactcgagtgtgctgaggagaagttattagcccccatgccagttatagatgttcatggaaggaacagagatatggaggggtgatataatatgtcatgaaccagtagagaaactatggttttctcagtaccaagcacaacaggcagatagatgtatccagatgggcagagagggcttatctggtcaggagttaggcttgggtaatggtttgaatgtgcttggctcggggagtggcactattaggaggtgtggccttgttagagtaagtgtgtcactatgggtgtgggcctttagatgaagatgtagaactctcagctctgcctgcaccatgcctgctcagatgctgccatgctcccaccttgatgataaggactgatcctctgaacctgtaagtcagccccaattaaatgttgtcctttataagacttgctttggtcatggtatctgtttacagcagtaaaaccctaagacaggtaccttccagctcagcacccctgtcactccttctgtctgccctaggatatccagtcttcctttttcagtaccatcatcttcatgacctctctgctccctaatgaatgcatttgtttagtacctggtcctgtgttgtctgggaggaatttaacacatcaggaatgagacttcctagtatatgtgtaacgctttcttaagagctgatatgtagtgagagaaaataataattggccctgagggagtcctggtgggatagctctactggatccacatccacagccaacagccagaagtcaaagatccaggagctgagccttgtactgacggcctgtgattgcagctgtgaagacagatgaggaagaaggaattcaagtttcaggccaccctgagctacatagcaaggccaaccagggaccctatctcaaaataaaaaggagttgggatggacgccagtggtagagcccttgccctgagatcagtacccagtactgaaaattaattaattagttagtttattctaaaagctcatgggaatgcttagaaaagaaatctcccttgagggtcaaacaggcactgcgagccatgaaacaaccagctgctgccttgagctctgtgaaggagacacttctcaacttccccagggcagatgggaaggaggtggtaacaacagccgcagtgcgcacacacacacttgccacatgtgtgcacttgacacacgtgcgaacacacacacacacacctctaaggtgaaagggcaggcaatgatggagtaatatgaactcagaacttcacctttatcagctgactgactagggactagaatacaccgagcctcacaggccctgccttgggccaggcaaggtagagaacagggggatgtggccccagctgagaccagcagttcctctcgtgatgagtatttccaccacctcccctgcagagcccttgtttagtagagcagcctcaattagctcgagcctcagctccctcgttccctcttaccctttctttctcaacaaatatttcaacatcatctaccatgtgtcagacagcgttccatgctacggtcccacagccatcaagacaattttccactgtcctcttgcgatttatgtctgatggtactttctgagaaaactggagtagagatgtgtcatatgcagaagggctccgggtggacggcctcccatctcagtagcccagcctgggatccgccgagctcaggatccctcttccacccagccgactccccatccctccagctggatccctcttccgcccagccgactccccatccctccagctggatgaagcatgtgttctttcatgtttccccagagatttggacccctcctctcccatggtagcagcaggtgagagtggagacctgagcggctactgatgtgataaggctggaaggcctgggcacaacaagcctggcactgcccagtgaggcagcccctcttagaatctatgtgtgagactagtaccagatggactcagctagctggtgatgttgtaggagcagatgtggagaagctgtcagacaggcccaggggcgtggagaagtgccaggggcttcggtgtgagatttgcatgggggtttaggggcatgggtgtgaattttccagagctgccaggacaagcaaccaaggctgagaagcatggtctcatagaaccatcaagatgtctgcgctctaggggagtatctttccttgcctcttcccagctccctggcctgccttggtttgtagctgcctctctgaagacattgcctccatcttcccctgacttcctccctctgtctaacgtctctgtgtccaaagtcttttcttttaaggacactagttgtgggttacagacccaacctaatcccatgtggcctcatcctaacccgagtgcttctgtaaagactgtttccaaataaggtcacatctgtgggtactcgggataaagattccaataaatgttttgagggacacagttctgcccaatgtaggttgaagtctatacagaccctgtcaagttcaggttcaccccttggtggcatcttcctctgaactacatgcattagcttccttacctgtgtgcacttagtctgtctaggaccaggaattgcttttgttcaacctgcttttctctacctgtctttgtttgggtttctgttgctatgaagagacaatatgaccaggacaactcttataaaggacaacatttaattggggctggcttactagttctgaggtccagtccattatcagcattgtaggaagcgtggaagcattcaatagtcatacctgctggagaagctgagagttctgtatcttgatccaaaggcaaataggagaaaactgacttccagcatctaggaggagggtctcaaagcctacccccacagtgacatactttcttcaacaagaccacacctactccaacaagaccacacctactccaacaagaccacacctactccaacaagaccacacctactccaacaaggccacacctactccaacaagaccacacctactccaacaaggccacacctcctagtagtgccactctctgggccaagcacattcaaaccaccacagacaggtgggtgggtggatggatggatgatgggtggatggatgggtggtggatgagtgggtggatgggtggctgggtgatgagtgggtagatgggtgcatggatagatgtatggatgagtgggtagttgatgggtaggtggtggatggatggataagtggatggtggttggatgggtagnnnnnnnnnnnnnnnnnnnnnnnnnnnnnnnnnnnnnnnnnnnnnnnnnnnnnnnnnnnnnnnnnnnnnnnnnnnnnnnnnnnnnnnnnnnnnnnnnnnnnnnnnnnnnnnnnnnnnnnnnnnnnnnnnnnnnnnnnnnnnnnnnnnnnnnnnnnnnnnnnnnnnnnnnnnnnnnnnnnnnnnnnnnnnnnnnnnnnnnnnnnnnnnnnnnnnnnnnnnnnnnnnnnnnnnnnnnnnnnnnnnnnnnnnnnnnnnnnnnnnnnnnnnnnnnnnnnnnnnnnnnnnnnnnnnnnnnnnnnnnnnnnnnnnnnnnnnnnnnnnnnnnnnnnnnnnnnnnnnnnnnnnnnnnnnnnnnnnnnnnnnnnnnnnnnnnnnnnnnnnnnnnnnnnnnnnnnnnnnnnnnnnnnnnnnnnnnnnnnnnnnnnnnnnnnnnnnnnnnnatgtgtgcatgtgtctcatatgcactctcctagcagtgggtagacagggattctctgccctccctccctccttccctccacctctctccacccctccctccacaggaagctccatttctgtgagctgcttgtctctgaggccccacacaggtcaaggtccccgaggtcatgggttagacattaggggacagtatccaagtctccgagccaaagggagaatggtctcctggagaagagttgaggaagggtggtacttaatggtagtctaggtccagggtgataccttagaggcacagtcacagccatctggctgtatgtgagacctgctggagacctgctaagaaaggtgtagcaccaagcccatgggtactctcaaggatgctctggcagcctggtgggggctccttctctaccaggagatcttttctgaaaagtaggggcatctctgctctgaagccagaacgaccctctgccctgagcaaccatcagaacaacaaccagtgctcctcaggctccttaactggtcacttctgtccttgggcactctatctaggacatgccactctcccaggctcatctcagtggtcgcagttcaggtcagctgttctcagagatgaaatggctgagggagacttttcatgggggattggacgatcgcctcctacagtcctgggtatgagcaaaagggcaacttcccactgctgctgcctgtgttgggggagaggccgggggacgcattagattccagaactctgaggtggggctgaagagactggcacctcctggctcatgctatgccaagcactgtgggcagctccatctgtcagcccagagctgagatcctggtctgctgccagctcaggactagcttgggagggagtctcagcttcctggccattgtctattgggagcacacccagtgtgttcctacagtgacctggagaggcctagagtgaggtgggagagacagggggagggagggagacatcgagggagggagagagggagagagaaggggaaagagcccggccagaacctggtcagggtgggagacaggaagtgagagaggaagactcggtgtttttccttatttgtgttttatatgaaagaaaacaaataatatcctttgaaaaaaacccattaaacaaagcatatcctgagggtcccagaggcccattgtggctgcctggagcctggaatccattcacacggtttttggctagattgttggaggctagaaagaccggagagggagggaaggaccatcattaaaatagttcaaaatggcttttgctccctggacttaacagaagtctgtgccaaataaccatagctccaagatcccgggtctgcctggttcagtgtcctcccatcacctctctgggaagctccatcaaactggccagtctgagtgtagtcaggggcaccagtgtcttccacctggccctgtgaaggaagactaaagaaaactctccctgaagagtcccagtgaagggagctgaagcccatagaactgccatctctctcttactgattggcctctctgggccttgatcttcctgtctaccaagtggggctctcaggtatcccaggccccaggctggaaccctccccctagacatccaagatacccctagatcccaccactgcactccagctgcccaggatggagtgacagtgttcctggtcatattctcctcgtggacacatttgcatgtccatcgtgcagaacagcttctgtgaataatcctacatgagcatttggtaagattggcattacaaggaggtctctccccaacctggatgtaagcctgtaatccttataatcgtaaagactgtgtgcaaaaccacccttagaattttccccggggccctcctttgaagcctagaagacaatcaactcttcgcatattttccctaaatgcttccaaggtaaaggaactgcttgggggatttggccctaggattcggagccagtttgtgctcaaggcttgggcttggcacactcatcaccattcttctcaatggcctatgctagaaggtgatgacatgcctagctggagactggaaaaggaacctgtccccttcctgcagcaattggttatgtacctgaccctctggatgaccagggaacactcagctctctggcttaggactctacaggaagggccccctggttgattttcatggaatcagcccttaaagagttcctaaagagaaggatgggaaggtattggtggccttggctctgctgcctttctctgcaaaaccttgaactacacattcaaccttagcatgaacaaaacctatttgagagcttgaacattaagagtccagactcttaagcatcctcccttggtagggattcatttgtattaatgatttccattttctggtgtgatttaatggtcagaatctggcctcccatgtcctttactgagttactgagtgttatcactggaaatgtggtgttgggacacacttggctctttacccaaagtgattcacgtcctctctttctccgtgccacagggctaccatccgatgccccacgaagcagagattgcacataccaagaagttgttccgaaggaggagaaatgaccgaaggtaagaaagacttgtgactgctgtcaccttttcctgggccggctgctgggcacgttagctctggtctatgctgtgacgcgacttaatacctgaggatgagttgctcgcctttgaggtgatgttgcaagtacaatgggctgggcttggatctgcatatctgtgctgggcccagggactgggtccctttggaagacccgcagagggccactgtctccattccttcctgggagtgagcattgctccagatttacagacatgctctctttccataaaccaaagctgcagcaagctcaaggaccagggccctcgggctgcgtgtttagaggcatggcctccaggaggctccccaacctcacaaatccaaaggcttccttggtctgtttctccatcattaggaattgtcctgtgtattagccacactttgcagtgaccctcacggtccagagtagtaaccaggggacgggaaaaacatgatgaggtggcttcgtgtcagagcaagcaactaagatcgagcatccaagacatgcatgtgtgcggtctacaaggctttcttatatggaaaggtcttcttgatgtagttcaaatgaaaaattccaggtgcagaatcatactgtgcgcagccatttgtgctaaagggggagtgggatctttttcttttttcttttttcttttttttttttttcttgcttgaatgtgcaaaaaatatttcaggatggaaatctttaaaaagaaagaataaaaaggcttatgcccaaggaatttaaatgaggtgtttccctgtagggagtttattcttagacaaaggtgatggcttgtggctttacctttagtaaaccgagtatgttctttaagaaacgagaaacagccagctgccttccttcactcggaaccctaggagcacctcccctgggtcctgcatggcctcagctggagctgctgggcttcggctaacccggggctctgacccttcactctggatggaaatcccaaactggaatatagtaggttggcagaagacagatacccagaatgcctgtcacccagtagtagattttctacttctgaaaacgtacacaggggaaatgagtgtccaggtatctgggaggcagtctgtcctgattgaggactgggaatcaacaggcatcagaagaggaaactgagttgggagagctgggccaacccccgcccccgcccctactcctgcccctgcccctgcccccgcccccgcccccgcccccgcccctacccctgccctgccggagcacagttggttgcctgctctgtgactcctctctgctgttacatagaaccgttcttgggttctgggttctgagtcaaggaaagaaatggggaacagccctcaaaggagaactgttgttcacaaggggccaggaaggtgtcagagagagcagaagaggcttgccatccttcctccccagtgtgcgcctcagagatgccaagactctccgagctcactgatgagaaggcgtctctgggccaagcactggcatccaggacagcccacatgtccacttttgagccaggtcaccacgctccacaggagtcgcctagacgggacaggcctccggaaaaacggtgtgacccgggagggagtgtgcatggcatggggagggccaggaagctgtaggggatgctctgcgtaggccaatgcacctcacaaaggatgtggaccgggccggcgtccaaagagaagcaataaagttgattaaagggacagaacgtatgtcctgtgagggggcctggagggctgggtagagaaaagagcatccacatggcaagacccatgaaagatttacgtggaagcaccggcggcagctgcccgtgtttacatggagggaacgtcttggccaccagagtcagactgcagctcagggtagcagacacacacagctgaagtatgtgctagacgaggaaccagtcagaaatataacacggcctgtttatcacttgggggggggggagtgtcctgctatagagcacccatatggtagattattttcaggagagagcaggtaacaatgtagctgaaaggctttattctataaaagctggggaattcctgagtctttcttgggaacagtggtgattcaggcattcacagacaggctaactgtgaattgccaagtcaaccccagctctcccagctgatggccctccatagtggcctcgttaggtaccaaacctgtgtgcttgacactagccttgttagcattgaaagcataagccacactgagaaggtgtcacagggagaggacgagaacctaggtaccgatggtaacctaggaacacagccagcatccacgtaataccccagatcttaccgtgtgtcatgagaagggaagtggcaagccacatcctgctggggtccccgtgactcaaccttggaacgcctgcaggagtcgttggccttctgtctccctacagagtgactggaattgggtccgatagctacaaacgccatgacaaactgctgtgcctagaactgagtggtaccttccggccagaataggcattctcaaacctgggacctagcatcctcctctgcacagcagtctgccacctgtcctaatcctgtatagcgctctaggcgtctctgtgtgcctcgtctctgcacttctctcccctggttcaatttggatgtactagatagctgacctatgtaggcatgagccttggaaataggggctgggtagggtgagttgcttcattttttaagggtgtgtacatgtgtgtacatgtgtgtgtacacatatgtgctggttcctataaaggccagagcgtcagctccccctggagccagagttacagacgatggtgagtctcccaccatgggttctgggaactgaactccaggtcctctgtaactgccgtcagtgctcttaactgctgagccatctctctatcctgccccccacccaaggtacacagttcttgaaaactgtgttttctttctttcatagtttgtgtccaatccttgagaggtttgcacaggctcattcttataaagcactgagtggtctttgcagcagggtgctctccgggtcaggggagctgtaaagggcacagagagcgtgtttctcattactgtctttcgaagtctaaccacataatcgtggcgtcccccaacccaggacagtgacggtcggtaggcagagcccctgtgaaggagcaacctaagcaggcactctgatgaaatctaacttgtggctggttttcccttattttgcaaaaggaattaaccacaaggacagcttacaggttttctccttacaaattttctcaaaatttggacaactcataactacctgcttattttggggggaggggagctaataaaatgtgacagatgtcagataaaatcatgcatttggggattaaaatatgcagtaagtgaatattctatgcatccctagtagtaacctggttttgcaccctccatcactgccaggtagaaaatggagagttgagaaggttcccctaaagctctctgcccagccccagcatcaaggaggaagaaattcactgaggggctgaggactgggctcatagagtctgtttaattcagtgagtgtccttatccctgtgggagggggaggagttgtgcaacgctcctcccacccctacccttgctcccctcacccctgctctgttttaagagatgaacattatcactgcagtgagcaaacactgcatgccacagtatctacagcctgaggagcagaccccaggatgagggcaagcttgggagggcatgctgtggaaggggcaagaggcagcaggctcaggcagagaagctgagcgcaagggtgtcattcccatccacccaaaaggtgggaccattctcaggagacaggcatcatttaattgggcaggggggcggggggacaaaggttatttaaactttagggagtgagtaggggtctttggggaaaacgtatatcattgactagagccagcatgctggagatacctcatttgcctaaggagacctttctaggtgctgctgggcatgacattttaaggagaaaggaaatttaacctgggcgcaacatgcaggcccagcatgttgcagggcagtggggggggaggggagcagtaaccctactcttgctcatgtccaggctttggacatgccttgaccccacctttgctccaggtgttccccccaaggctgcacagctttatcagggcagacttggtgacatgttctgaccctacggggagttctgaagtttgagggacttctgagacttgacctaagatgcagagactatgaagaacttgatgtaccgtgtcccttgattgtccgaaaggggtgtggtctgaggatgagcaggatcagggccttttccatgggggcagcagaagggtgagccctgtttctgaaagggaggtaggcagtacatttagctccccacagttaagtgctgttaaaccccttgtcttattttacctttctttgctgtgacaaaacatcatgaccaatgcaacttataaaaagagtttattaggaccttatagtttcagcgagtgaatccataaccgccatggtagggatcatggtaacaggcagcaggcatacatggtgctagagcagtaactgagaccgtagatctggatccataatcacaaagcagagagaaagctatttatttggaaccctgaaaacctgcttctagtgacaccgttcttaatctttctcaagcatttccaagtactcaaatatatgaacctatgggggggcctttctcattcaaactaccacacctccgattagaattgttctccgtgttattgtgtctgtgatctggagaatacaaggacctaaggtggagctgccacagtgacattctggctgcagaattaaccagagtgttgtatgtgcctgtgcagcatccaagtttgtgggttcagagaagagggcatcatgggatgttggggtgaggggggagattctagaacactcccttttttggagtaatggttcaactactagtgaaactccagaagactttgaaagagagacggagcgagagggagaagaaaagccacagctaggcaaatgatgcaccagggattcccccagaagtcaccctagaaacagaggcaaacatggggctcagaagcccccactatgagaagacactgtgcttgctttgaatatccccctgcctaggttgtcaggagtctcagaagaccccacagactccaaagcccagcctgccagtacttcaagtagggagattaatagacacgacatggccacgggcttttgagtgatgcccacctgtgctgtcaggagtgaggagagcccttcaagtgaacttgcttcgttaagtgaggtcccggaatggttaatgtactccatgtgcagagcagatgggcaggaagaagtgaagaatcccttggccatcctggccagcgtcagatggctccactgcacgagaagccgcaagcgagccatccccctggggtgcagagtcgggctacatgctggatgctgcagggcggccatagtgtctatcctacagctgaccgtgactgtggcttggtgtcctcaaactgtggcagcagttaagaatctaatctctccccccgcttcctctgcctgcacaaactcagatcccaggcatcagccatcggctttgattttgcaagctccttgtaaacactgtgtgtcactgataaaaataaacagggcaagtggaattggaggccgttagtataatatacttacagatacactaaaaacactgattctgcgcttcacagggttgcctttttatttgtaattttatttatttacatttcaaatgttattctcgttcccagtttcccctctgcaaacccccctatcccatcctccctccccctgcttttatgagggtgctcccccacccattccctcctcagtgccctggcattcccctacactggggcattgagccttcacagaaccaagggcctgccctcccattgatgttcaacaaggccatcctctgctacatatgcagctggagccatgggtcgctccatgtgtactctttggttggtggttgtactgcctggttttgtgtgtcaacttgacacaagctggagttatcacagagaaaccatatccaaccataaggcattttctcaattagtgatcaagggtgggagggcccattgtgggtggtgccatccctgggccagtagtcctgggttctataagaaagcaagctgagcaagccagaggaaacaatccagtaagtaacatccctccatggcctccacatcagctcctgcttcctgacctgcttgagttccaatcctgacttcctttggtgatgaacagcaacatggaagtgtaaccctttcctccccaacttgcttcttggtaatgatgtttgtacaggaatagacaccctgactaagatggtggtttagtctctgggagctctggggagtctggttgttgatattgttgttcttcctatggagttgcaaaccccttcagctccttcagtccttccccttactcttcccttgaggaccccatactcagtccgatggttggctgtgagcatacgcatctgtattggtcaggctctggcagggcctctcaggagacagctgtatcaggctcctgtcagcaagcatttcttgacatcagcaatagtagtgtccggatttggtggctgcatatgggatggatccccaggtggggtgtctctggatagtctttccttcagtcactgttccattctttatccctgttatttcctttagacaagagcagttctgggttaaaattttggagatgagtgtgtggccccacccttcaactggaggtcatacctaacttctggatatggactctacaggttctttctcccctttgttgggcattccagctaatgtcatccctgttggatcctgggagcctctttctttcctggcatctggcatttttggtggctacccccagttccccattccccattgttacacacctctgttcaatttcctgaccctctgtacatctcctccatctcctcccatacctcatcctgtgcccctttttcccccctctccctcttttcttcctcccaagtccctcccaccctctacctcccatggtcattttgtgcccccttctaggtaggactgaaacatccacactttggtcttccttcttcttgagcttcatatggtctgtgagttgtatcatgggtattccaagctttttgtctaagatccacttatcagtgagtacataccacatgtgttcttttgagtctaggttacctcactcaggatggtattttcaagttccatacatttgcctgtgaatttcatgaaatcattatttttaatagctgagtagtactccattatgtaaatggaccacattttctgtatccgttcctctgctgagggacatctgggttctttccagcttctggctattataaataaggctgcatgaacataggggcacatgtgttcttattacatattggaccatcttctgggtatatgcccaggagtggtatagctgggtcctcaggtccaatttcctatgtccaatttttctgaggaaccaccaaactgatttccagagtggttgtaccagcttgcaatcccaccagcaatggaggagtgttcctctttctccacatccttgccagcaactgctgtcacctgagttttttatcttagccattctgactggtgtgaggtggaatctcagggttgttttgatttgcatttccctgatgattaaggatgttgaacatttctttaggtgcttcttggccattcggtattcctcagttgagaatttgttgtttagctctgtactgcatttttttttttaactaatgagttatgtgtcacttaaaaaaaacacaattttgagacagagtttcattgtgtagaatttttgaactataattctctgccccagtttttactagtatcaggattataggcatgcactactagattcatttctgaaaaaaacaagtagtgagatttctttgttgtttgtttcttaagtcgtctcagggttctagtttggttttatgattagagaaagtccaaggattgagtgatgggaaaggccccttgtaaccatctttggatcttgatgtctgtagtgttccgtgaatgtgccaggaaagtgaccctttcaaaaaaggacacagatttggtctggttatgatttaacctatgaagctatgctaggaataaataatcacttgttttcttctaaaccatctatatttgcaaatctcctttaatttttgaaatttagaactgtatgcttgtagcttcaacctttccccattttctatcagaattagctcttgtgatcatggagggcagaacgtcacaggctaccacaagctatgtcagaagccagcggtatgattcagtctcaggtccaaaaggcaagaaccaagtctgaggccgggagaatgtcttaagaatgtctgtcttaagaagtcagcaagccagttcagctttcttttgaaccatgcccctcccctgatgggttgagagacgcccatgtacactgataagggtggagctccttgactgagcacagtgattcaagtgtgatcaagagtgattcaagtgtgatgactctaggaacccctggttgcctgtctgcaagtctcagcagctttctggagcttgtgtttcccatgagttctaagcatttctccatccatcaggagactctttacaaaggggtttgtcttccaggaactgatcagggactgactagtccagccctttgtctttctatcagctcattcacataaattgctcagctaatcctcttagacatacagacagtgttcattatccacggattccatagtgcaagcatgcctacttgttaaaacttacagtaacatgaaaatctctgatgttttgagactccatcattggcaggcatggaatagtaggtagtttgagtcacatgccacacaggatcccaacatcacacaacgcaccatcctatcatccttattttgtctctgatcctgatcaaggtttgtcttagggccgagtttttcactcttgtgtgcttttgctagtgattttgccgtctgtgtggctcttgagtaaagagtgggaggtttatgtactgaccctaagttcaagttccttgttggaatagaaaaggaaattgtgggcagcgtgatcacagatctgtttcatcatctccaggattttaagttcaagaaaactgtgatgtgccttacagagagaccaagcatttaaaaatcttcatgccagcaggccttggtcctgcaatgagttcaacgttagctggtctataacatatagtaagtaaacagtctataggcggctgaagagatggctaagaatactgccagcttttccggagatatggattcaattcccaatacctacatggtggcttaccaccaccctgtagctccaacccctgggaatcttgagtccctcttctggcttccccaggcagagcatacatgagttgcacagacagatatgcaggcaaagcgcctatacacatggaaataaataaaatataaaaataagtaagcagtctataaacagaagcacacatataaaaagagattgtacttgatgagtcggtgaaaaatgtaaacagaggggctgtagtaactcagtgtttgctaattccttgttcccggtgacactctggaaagtcgccttctgagcaacaaggatgagccgtgcttgctctttaaaacagggtagagagctactgaaggtggagggatgtgtggggagccatgggacttcaggcatgttcacacatgggtagtgatagggcagggaggacaggagtgggcacttcctaccccggctggctgtcactggcttggtttccactgcttcatctgtgccatcctggggtgacgccatcaccaaagacagctcagccccatagtgactgtcactgccatcctcttgtcaggagctggggggaccgtgaggcagatccacgctcacattgcccacggtttctctttctctctcagcaaggaaattgccctcattaagtccctgctaaagatagataagaaaatgggccaggcagacccccgcctggcaggcagccctgtcagattgggagcaaaatgagtcaaataggaattatttttaggatgtctcctcctccccgcacgcccacccccaggcgggctctcttggaaagaagagcagctcattgcttcaagccacatgtccgggtcctctcagtccttgttagattgaaggggagcccccagaacaagccgtgacatgtcacaccatcctctgtagagtgcagatgcttcacccgtgttcctggtcctcgagaaggctgggcacacccccctgtgagtgatgtggctcctggatcccttttctaccgctctcctttggggtgtacgctccaagctcaggccccactcccagcttcacgctttatgagattacagaccccgtgggggaccctctcctatagaggaaccagtgtgtccctaactcagaacttacaaccatataggggccaaacagacacaagaggtggccttccatacatttgacaggttctctgggtaaatgagcagtgcccatctcccagaactgtgtccacaactgtataactgggcgttcttttttttttcccccatcattcttaccccctttgtccagctgtctgagttcattcagaccttgcaagttctaaagagcaaagtagggatattcaagatcaagaaaggtaactaaggaaggggtaggggacatgccttgtgacctggggacaggagggctattgacgaggaaactagccatagactgatgcagttccaggtgtttgtggctgggacagggcacagaggagcctaggagccagccacccagttgcttcagcttctccacctcagatgtcctagccgttcattctctgcaggagtgggcatttatgcattggctcacaagcaccagctccaactcttcctcctccacacaggctcaaataaccaagctctggtcaaccaatcatctgagtgtcccatagaggacagtgggcatggtgatagccaagcccttggcctggctcacttgattttaggtccagctcatctttcaccaaacaggggtctttgagggtgttgcggagggggagacattcactgaatttattcttcttgttctcagggtcagggatgctattaggttatatgttgaggcaggtgcttaggaagaccaagtaataactggaccctcagaaaacatgagttccgggctggagaggtggctcagcggttagagcactgactgctcttccagaggtcctgagttcaattcccagcaactatggggtggcttacaaccatctgtaatggaatctggtgccctcttctggtggcagctacagtgcactcatatacagaaaacataagatcctcttcctcctaccatttactctgtgaacccttcacagtgtggagggaaaagatgctggaccaagagccctggagtctggtccaggggcgtttgcctttaggagccgagttctgctgctgtgaagtgggactgtgattctagctatcacaggtattgcagagctcatgctacagataaaaacagtgtctctcctgatctattcattcaccataggaagacagaactgagaacattatggaagctagcccaggccctcaggaaaaaaaaaatctttccagaaagttctagacaagctgaacatgtctctgacccccctgcatatgtctttcctgtctgtatgtctttcctgtctgtatctagtccagatctgtatgccggcaccccaccaacctgagctatgctgccatgttctttgcatctggctcagacaccacagaggggcatcttatttacagaggcgccaggctgcacatctgcaggttctaagggggtggcaggctctgggttcacaggttctaaaggaataccaggctgtagatttactagttctgaaggtgtacaagacggcagactgggaagatgtaccagtctggaggtcactggtactgagggagtagtaggctgttcttctatgggtccttcggctggatcctgagatatgcctgacccaccctcagcccaggtcagaagtcactcagcaactccatgagcagttccaaggctcgctatattaagagcactgttttgagccttaaacaaatattagttcgtatactctcctcgacatcccaaggaagggcatgctatttttatttccattttgcagatgaagaaaatatcatgtagagaaaaataaagcggctaggaggcctggcttcagagcctgtggttctcatcggagctctgaggtgaatcttcccttcactcccttcctcctgtcctgagaccctcgatgccttcggcatagacccaataaactcgtagtcaccggccgttcaagactccagggtcttgtcaggatagggcttctgtttttcaaatggacagagagaagggctgctctgcctcatgccaaaggagggatgaatgaaaagacctcagccaaacccaccagacagtctactcggccacagcactaggccagccctgccctccccctaccgagcaaatctatgagtgagcatatgttggaagttcctgcagtggaccacagatttttccaggttacagcccaacctagtaagaggcccaagagaggatcacataagttacagggaaatgggtatccccgaagagatggcttcatctagctgccctctgcttctaattaggaggcccaaaccaaggcataagggtacgttgcacacacacacacacacacacacacacactgccaaggctccgtagcagtgaccagggcacaggttttaaaaataccaaggagccttcctgcctgggtcagcatttaccctgtgctctgggagttatttctgaatcttcccagtaacttaattttagccactttattccaatgcatgtgttttagggatgccaaggtagcctctgttacggtttggagtattttgggagggcctggtttccagaagtgatgcaggggctcaattaggcaagacaccagcaaacagaaataacgtaactcaggaaaacaggtccctggaggtgacgcctctgtgttgctcacatgggagaagccaggggaaagggtcagcagggtgccacaagtggctgctcaggctctctccactctatgcacctacagagatctacctctgagcatgagcagaatgaagctacccaggttttccaagtaggcccagatagacacaaaatggcccaacaccagagtagttaaacccaagtcaatggtaggctccatagacccaccttataagtgctccatagaccctcttataagtggtgagacacccaagttcaccaggcatccatgggaagtttaaacatcctcactgctggtacatcaataatgagatgtttttggaagaatcactaaagagttcatcactttcccctccagtactagggactgatcccaaggcttcccacgagctagccaagtgctttgacactgagctacatcctcagccctcttctcactgggcagggtttcactaagttgtctgggcttgctcactctgcaccccaagcaggccttgcgttatgagcattgtactggctagttttgtgtcaacttgacacagctggggttatcacagagaaaggagcttcagttgaggaaatgcctccatgagatccaactctaaggcattttctcaattagtgatcaagggggaaaggccccttgtgggtgggaccatctctgggctggtagtcttgggttctataagagagcaggctgagcaagccagaggaggcaagccagtaaagaacatccctccatggcctctgcatcagctcctgcttcctgacctgcttgagttccagtcctgacttccttggtgatgaacagcagtatggaagtgtaagccaaataaaccctttcctccccaacttgcttcttggtcatgatgtttgtgcaggaatagaaaccctgacttagacaagcatcctcagaagttttgggttttgttttttgttttttgtttttatatagtagaattataggcccggcttgttcataagctttcgactaagccttcagaagccctctcttacaagagccccagggcctgctccatctacctgctgcatctctccctgccgatccttggctctccttgcctgccttctcacctcctgtctttactcaccaggccccaatcttctcttagttcctttagtaggcctgtgctagctgaacccttcctgggactcctctccccaggtgtcttagtgagggttttactgctgtgaacagacaccatgaccaagacaactcttataaggacaacatttaattggggctggcttacaggttcagaggttcagtccatgatcatcaaggtgggagtatggcaacatccaggcaggtatggtataggaggagctgagagttcaacatcttcatctgaaggccactagaagacgactagcttccaggtggctaggccacacccactccaacaaggccacacccactccaacaaagccacacccatgccaacaaggccacacccactccaacaaggccacacctccaaatagtgcctctccctgggccaagcatattcaaacaccacaccaggcttcctctgctggaccatccactaccctcactctttagcctctcctctgccttttgctggtgctcattctgatgtcagtccagttcccaggtgagtcaggcctgaggacccaataatggacaggaagcctgagagcatactggacccttaccagttgtgtcccagagaatatcccctgcttcctcattcacctcctttgggcacaccattacttcaagaggacaaagaattcaatgttggtgtggcactgaactcagaaaaggaaatgtgtaaagactggaaacaaagatggttttagaaagaaaacagatgagacagggctggtggccccactggtcacaccacacatgcataggtggttcggtgtgttgaggaatgggtagctgagcctctagcctctgaccaggaaacctgatgcctttgatcctgagttgcagccatggcacagagaggtagggtgggaaacctggggcacaggcagagaacagacttgcctggtgttgctgatgttggaaatgcttaggcaggggcagagtcaggtcattaggtccctctgttagaaccacatgggccagcatcttctcaaagccctcatcccattgcccttccttaaagcaccagggaaatctcagaccctctctcctggccaatcctggtatattttagctttgtgacctgactgtaagccattgaggacagtaatccttgtgatgtgaaggggaatgtgccatcccccttctatacaggaggtccctggagcccccaactcactgcccacaccccctgacttgggaagtgggtgtcattggttaatttggtctcaatagatcacccaggcagatctctgtcttttcactagcaccttcagtggccacccagagttaagagactgatctagttgcaacacattaatgagaccacccatcccatgagtggagggttctctggtgcagggagtgagaggggacatttgttgaaagaaggatttttagtttttaaagactgaaaaccacccgacttgaagcaaacacacatttggcctgtacctccattgtctggaagctgcacagagtgagcctctgcagagcccgcattccagcatcattcgcaggtggcctcatgagtatgctgagctgtctagactccgtttgagccctgttgctaggtgagtagcctcaaggcaaaattttgcctctttgaagcagtgtatcttctatcaaatagcccatctcttttgtaggtagactttgcagtgcaaatcagacggtacctagaaagcagcttctgataccaagggctacacgaacctgagaactttgtttgtgtgcattttatacctatgtctatatctgtaggtatgcatttgcgctctctctctctctctctctctctctctctctctctctctctctctgtgtttctctgtgtttgtgtcttgtctatttctcctgtctctgtatgtctctgtgtgtatctgtctgtgactgctttagggaccctgctagtcagcattgccaatgatagtgtgctaaaaataaaacaaaggaccaggggctggagagatggctcagtggttaagatcattgactgctcttccagaggtcctaagttcaattcccagcaaccacatggtgcctcacaaccctctgtaatgggatctgatgccttcttctggtgtgtctgaagacagctacagtgtgctcctatacataaagtaaataaataaatctttaaaaaaaaacagcaaagggtgagaatgaatatttatgttgaatatttatgaatgaatgtttatgttacatatcaaaataattcccaaaatgtaggacttaaagtcccgagtgtttataagcccacacaatttcagagggccacaaacccaggagtagctcaccaagtatgttctggctcagagactctcttgatattggagtctagctatcaaccagggatgtagtcaccaggggctcagttgagagtttggatatctatttcctggtgtaccaggttattggcacgtcccacttcctccagagctccgggttacaaggcaggtaggtctcttcacatatgcattcatgacatgacatgctcatagcctcagttaactcccagagaatctcccgagggaagagcagatggacagacaggcaatcagacactaacatggaagctgcagtgttctattctttaagactcatgccatctcttctgtcatcatccgctagccagacaaatcttctgtgtcacaggggaaggtccaagggtgtggccttccaaaaagtgagagccatctggaaggctgactactgcagcccacctgccacccccagtgattcatccctcctctatccagagtacacttgctctgcccattgttactagttggtgacatcttcagctcagagttcagctcccgtccatagaggtcatgtgcaacatacacacaaaactctctgggtgtagttctttgtatctggttctttctagatctgtgggcctctggtctaaaaggatgagttagctgtactcttacatataaacatacccagtatataactctaggacagacactggggagtcactgccataaacacccattcaagaagagggggcatataactcatttgtctatagctcttctgcaattcagctaggcaaatgccagaggttcctccctcaggtagagtcctgccctgtccctgtcagagttgctctacgtggctctggctccaccctctgccgtggaggtctcacatggagatctctcatgttattgcattcaagatcagtataagatggagatctctcaagtgatggcagtccttgatcagtcagtatgctaggctctcagatctacctctaagtcatccctccatgtctctgaagcatggcatgtgtttgagttattttctcagctggctttctgtgttgtagaacttggggtccaatggcttctgtttattgccgtgtctctggcccttctggtctcactgataaggctcttttgaaaaccaggtagaccttctgtgaaacccgctgttttccacaccactggggaaagctcaccttcaagtcactcaatagtttttctctccttctctttgaccttctgcagaaagaatgccctccagcttctggaggctctcaagtgtggttgagaagacctgtgagtgacccttgaggacagttagaggcacctctgtttcactgagctgtgctggaccatgccagcttccatcctcccaacatcttaaccaagtcccagcctacagtctttggactgtgctttcctgagcatgctggcttctgatctttacccagaagtcatttcctaattttagcatcagatgccatctggttaagtctaggactcttcagaactagcaagttctggttccttttgtgtgtgtgtgacagtccttcttttaactcgtctagctcctctcccagcttacgctactcagcaagaaggaaccaggcaacatctttgacactctggctggaaatgttgaggcaaggtcactgcaccactgtggatatttatacttgttcccctcagcatagcatcttggatgctgctcataaggtccccacctgtggtctctgtaatcctgtcactgcccatgaatcctcacagtggtttatcttaaagtcatgtttctccacagagccttagctcttcacaaacatgtacttgaagtccccattcctgcctactacccaggcctgagacatccccatgtttgagattttgctgcagtagattccctaggcacaagagctccattggttatctcatgccgtgtaataaattagccccggaattagcagtgttagcccacagtgtctgaggttcaaggatccagaacaccagagctgagttcctttggctcaaggcctcttgtgatattgcaggcaagctgtcagccagagcttctccttgtctgatgtgaggctggcaggcctggtccccactggctttaagctgaaggcttcatttctttgcaattgagctgctctacatgatgttcatgcttaggggagaaggagaagaggagaaaggagggaaagaagaaaggagaaataaaggggggaaggaatagaagggagagagaggcagagacagtatggcagagataagataaaggaatgggggaagtggaaattacctgagctcttacaagccactcttctgctgtggaaagcaacctgtcatcccttgtgccatattgtgttagccacacagaactagcctacacagtagaggaagggaccaaacaagtgtgtagtcaggcatagtgatacagagctgtaccccagctgtggtggtttgaataagaatggcccatagagattcgtgtgcgtttgaatgcttggcccatggggagtgacactattaggaggcgtggccttgttggaagaactgtgtcactgtggaggcgagctttgaggtctcctctgctcccagctatgcccactgtggcacagtctcctactgctgcctgtagatcaagatggagaactcttgcctctgccagcatcgtgtatacctgcacactgccatgcttcccaccaagatgacaatggactaaacctctgaagctgtaagccagccctgattaaatgttttcctttgtaagagttgccatggtcatggggtctcatccgtcatggaaccccaaccctcaccaaggcacaacactgaggagaacgaagcagtgacagaggaacatcacgtgcttggcagcttggaaaacaaaagaccctgtttcaaaattttacagtgttcaggctcaagaaatggctcggggttttagagcacgtgttgcggagtttggttcctagcagctaagtcaagtggctcacaactgcctgtaactccagctccaggaactccagcagtctcttctgagcatggacacatgcacacatgcacaccacacacacacacacacacacacacacatagtgaaaaataatcaaaataaataaatcttaaaatcagtagtgtcgatgcaggagtgaagagacattattatctatttaaatttcctgactgtgccctgcccccttccactttaaatgtgaagcttcactaaaagcctggagtgggttgaagtttttgtatttcccgccttctagttcagcttccgagctttctaagaacacccttcttagccagctccctgagctgtcccacctccttcccttcatggctctcttctgcacatctgcagtggagcatcagttaagtgtctcctccctggggaaggcttggagctggaaaatgccattgcctgggcttttgaacagacttgtcctgcagggagccggaggggattccaagaaaaggggaactttccaagctgtaagcatatacatgcacgcaggtatacatgtgcttatatacacaggcatacacacacacatgcatgcacacacacacgtgtacatacaccacacacacacagatgcacacactcaccatataaactctagaatctcaatcattacaacaggctgcacttttaattggaagcataccagaacactggaatctgccaaaaactggtagggaaggcttccatgggtagatgggaaaatacaaaaatattcacagtacaaataatggtgtcttgcccagtctctctcagagtgccctgaagtgggtccaggaggaaagtaagctaagtgcttacgtcctcaatgtacaggggaggtatgtaagactcagaaaggccgggcagctaactacagacctgctagagacctgcggagctgagtgtctcagatctctgaatgcacacacttcctttcatagagtcctggaaggctggtcctgtatagaggatattctctttaccccttcagtgtaagtaacctgaaattgtatactggcccaggtaaggggtcccacttcttatgtgtaagaaggccagctcttctgtggttgatttaggggcacagcagagaaggctgtcagaatggtaaactctaacaggtgtgataaaagatggtgaactaccacacggtgctaggtgctagtggagataaaggggactcgctgactccttcaagtcacttttgaggtacccctggtaaaagcactttaagagaccctgtccccaagtggagaaactggtgcgaagtgccttgtgtacctcgtgcaggcaccaagttatctgtcaccacatttacctgcacatccaaagcccacaagggttgtacttttcctgtctctgaagctgtgggccaggtggcagggccctgagactgggtgtggagtgcccctgagaatggagtatagagctttgctcatggatgacgccagcagacccttcagcatgggagaagcaccagggacattctgaagtctagagagcacacatacacatgtacacttgagcatgtacgcacatacacacatacacacacatatgcacacactaccattgaggcctcctgttgtgaaccctgacattggtttttaacatatgggttgtgacccctttggaggctgaacaacccattcacagggatcacatatcgtatatcctgcatattggatatcctgcatgtcggatatcctgcatgtcggatatttgcattgtgatttataactagcaaaatcacagttatgaattagcaatgaaataattctatggttggggtaacaacatgaggtaccatattacagggtcccagcgttaggaaggctaagaaccactgctctgcagtaaagtaggtttccctagccctctcctgcccagagaataaataccggtcaagtcacatctctagcttaggaaatcaaaaagagctaggtttggtgttggtaggtaaagggatatatagctggatagtttctcccaactatatgggaactggtcacataaaccaagacgacttccctggcttcagttaggttggggacagaaacactgatgtccataccacctgcatctgctccatttacaacaataattactggtgctcctacacggtaccttctgtgccaggcaccttagctggatcaggggccagcacactatctacaaagctctctttgtgaggcataggcctctgtcgcagatgttctcttctgccactgttgtgccaaggcagcctcaatgatacagaaatgagtgctttcatttgcaaaacaaatgatggctggatttggcccacacaccacagtggaccggtccctgatttagattgtcacagctcggtacagcactgccccaccccagagctaaggagaccatgtgtcaggaggcagcatctccttcatgcccatccttcttcttgaggcagccttcattccgtttaacctaagagccattcccagaggcacatttcgaggcagacttggtcctcccatctgactaaaagctatttcctagggccacattgtaaactagaggccttgcctgaggcagactgggaaggcttaaagattcaagtccctaagggtaaccaagaggaagcaactgaaccaccaaggcttaaggacgtctcctcatcctgttgactttgtggttaagacggtttgaacagagtaggagatggagcctatagtaagacagaaagacggacaggcaggcaggcaggtcggcaggcaagaggcaagtgttgcctcagcatctggctgactacacgtcttcctgtacacatctgtgctgcctccagacctcaccgtggagaagcctctgtgggaatgtccacagctcctcagtccagagttcagagctcagccagaaagtggtaggtaggactcttgtgcttggctgcctggccctccccagccctgctggatctgagaactctccttaacctccagagcagcgttgcctctcctccagagaaacagcctaaaatgagtatggctctctgcccatgtgtcctccgttccatcctagctgtgcaagaagacctgcgcaatagccccccgacccaggtctgccttgtgcatggtagggaaagagcctggctttttgtgagcaggtatctcagaggctcattcctccgccctcagcataggccacgtgtatctcctcagacgctgatctatatcagaagaggaaaaagaagagacagcattatcatttgaggggtaccaaggttattttggatcgagcctccattgatggcgcatactgtttaggttaaaaagtcacaatcccggggctttagagatgactcagcagttaagagcactggctactcttccacagaggtcctgagttcaattcccagcaaccatatggtggctcacaaccatctgtaatgggatccaataatgccctcttctggtgttgtctgaagacaactacagtatactcatattaaataaataattaaataagttcgcaatccctataattccctccaaaatggagctacctcatggaggtggtgtctgtgagcgtggagttgtgcctgcgattggctttaccaagcctagtggattgtagatagaggggttatgagagccatacagaaaactgagggctggtcccgggtgggagtggcaaccccgtcatgagccacagagcccctgccgtcctgtctggggaagtatccattaagccctcagatccaaccacagcctccgtagctggtgcagaccaggctgtctctgatggcagcagccccctgagtaaccagttgactgtggggccatagatggagccccaaatcagggaatgtcctggaaggaatcaggagaattcttggtgcagcaggagagcaggattggtcctgagtcagggattggtgtccaagggcagagatgatatatcctaccatagaggagtgtggtcctttgaggagaaggacaatgatgtgtctgcctggcttttcatgtggccagagcagaattcagcaataacgtgagaaaagttactttgcctggtctcttctaggctagaccagtagtgactcttctaggctaagcagactcccttatagttccccccaggaagttgtgaccagtccactcttcctttgaggcctccctcttatctttagagtcctctgcccatttattggggtcttccttatgggggtaaacagcaagttgaggtcccagctagaggttgccaggtgatgctattcagcaaagccacttgggaaaatgagtccatattactctgtcctgtgagcctggatcaaccccaaagtgggagcagccaacaggggcccacattaggcccactggaaaacagaccacaggtcccaactccatggttcccagggtgatgggggccctgcaccagtccctttggaagtatatgaggacccaggaagtggtcaggagaggaagcacaatgcctcttacaggcttcaacgtgggccaagcagtcaaagaatgtatggtctagttacaaaacagaaagtaagatatactgaaaagcctgtataataacaatatagctatgtatgtgcttgtatgtacacacttgtaaataagcatgggtgtgcatacatagagttaagtatgtaatatgcatgttatatatctacccatgctgtatgcttaaatccatatatgtatgtctctacgtctatgtgtgagtattgtattgtacgtgtgtgtgtgtgtgtgtgtgtgtgtgtgtgtgtgtgtgtgtgtgtgtatggttgcatgtgtcacacataattaacacaatgcagggacctgggtttaagagagagaaggctttctggggttaactgggggtcaagcagctttcctgatctgtcccttcagtaagctgggggcagaagacagggggtgatcactcccaataattgacaagacagaagcagaaatccaggcaggatttactgcttggtgcagttcagggacagtaagcaggctgcccttgttcagagaaccctttgaggggcttcaaagtgcaagcagctcagggaggtgaatgtaaccagaaatacatcagagagtcagagccgtgtaccaatctgccactctccccgaaatgtccccaactcaggtgtgcaggcggcatgttcatgggagcttgtccctgacatgggcagcagtagaaaggccagaagcctgtggccttgggaagagggagagaagaagatgaggctgcaagctgccatggacactaagctaggagggagaggacaccattcagaccacgttcccgccgcttgctggaagcttcagattctgagttacacacacgcacatgcatgcacacgcgcgcgcacacacacacatgcacagacacacacacacacacacacacacacacacacttcccctaactctggtcagactacggactgtgggatgcttgctgatgatgcagttcttccaatcaaaatagacggggagcggaatctgagacatccaggcgctgaagtctgctgggaaggtaggcgctccttgccctctgagaacctgcagtgagcctggctttggatgcagggcagagctagcaaacggtccaaaaaatgtttacagagggaagagcggccgagggcagggccgcccgtgatcccggatgtcgtgggaagtggaggaggtggaaaggacacaccagggtggtctggtggttgggatggccgtgttcctgggaagagttgccacaaagcattttccccggcttctccatggcagcgatgttgcttcccagagtgttatgaaaacctgctgttacccggcagcctctctggggggaagtgtccagatctcctcttctgccttccaacatacactgagtcaagacagggtcagtgcaggaagtgggtccctctccacacttctcatggggccgtggttaggaacgtgaggactgggaaggtgaaggggacttctggctggatgccacaacttctcccgcctggcaaaggcaaccatccatcctgttcacagcatgctctggggaaatcagcagttccatgacatggctggaatctggaggcatgctcggccttggcactgagtgggagccagagctgtggcctgatcctgggagcagtctctgggcaggaaactgtgacgtgtgccttggggaagcggcacatgccgggtccacttggggatggctcggctttgctccctccagctcctcctatgattttccctatgggacatatgtgtttcctggaatcctgccctttacacgtgtgggttgtaatggaaggcatggagggagagtggagctctctggaaaggtagccgcagctccagttttcacagtggaggaaaaagtaaaagcaggcctgcgtcgggaactttctagagccgtacaccttggctggtgagcccccagaagcaggaagggatgtagggagtgccctgtgggtaggccagtcatcaggtacttagcctcctcatcccaggaatggtcttcagtcctctgccatctgactaggtatccagggcatggtgccccatcagcatttaggcagctgtgtctccctagagtcccactggtgttcctgctgattgtcattgctatccccacaacccactctatggttgtcacccagcagacccatgcctccctactatgtgtcctgaacagccgcacacgagagctgtggccttgcctccctgccctgctgctccctgtggcttggnnnnnnnnnnnnnnnnnnnnatgtgtttcctggaatcctgccctttacacgtgtgggttgcaatggaaggcatggagggagagtggagctctctggaaaggtagccgcagctccagttttcacagtggaggaaaaagtaaaagcaggcctgcgtcgggaactttctagagccataccaccttggctggtgagcccccagaagcaggaagggatgtagggagtgccctgtgggtaggccagtcatcagggacttagcctcctcatcccaggaatggtcttcagtcctctgccatctgactaggtatccagtcctccaccatctgactggtatccagtcctctgccatctgactaggtatccagggcatggtgccccacaacatttaggcagctgtgtctccctagagtcccactggtgttcctgctgattgtcattgctatccccacaacccactctatggttgttacccagcagacccatgcctccctactatgtgtcctgacagccacacacgagagctgtggccttgcctccctgccctgctgctccctgtggcttggccaggaataggttggagttgccctctatatgtggtccctgttaagccagagtaagcacatggagacaccttacccggtaccagacacttgcccttggcagccctggactacaacttgacacctctgccgggcaatggcggtgttgtctgaaaagccccaccccccacatcttaagatcaaggtcttcaccttccaagcaggaagaaaccacaagatcacacatggttctcatagcatacctacgtgaaaggtcattttcgaccctaactaaaagacgacagccatgatagcgaattgtgaacaatatatacaagtaaattcttaaaaagaaaagaaacctattctagtgtaaaaatgctacgcaaggaattctgggaatgtttgaccattagggattccttggctccaccccttctctccacccacatccaggtcatcagtgattggtccagcttcaccttgaaaacaaacccccagcttcctgtctctgtaaggctaccccagagctctgctggctggctatcatgagtctgttcctgtcgtcaccttagtctctttgcaactgccttttaaatgtcatccagacattagttcccccatttcatgtaggataaatgacaaagtctttccaatgatttaaagacgaggtggcttttatcacttctctgacctttgcttgggtcacgctgaccttgttggagatcttgaacacgtgagtgagctcctactcccgggcctttgcactaacacatctacacgtatcgtgcctctctctccatcctggatccatggctgtactccacttcctcaagtaactgtccaatgtcaccttctcagtgagacctatcctaatctgtctacccgaaagggcacccctagtagagagggtccccagcagtgcacattcacttcctgatccctcttcttgccttccttgcctcaaagggcttcatgggcttcaacacaggggtttgttctctacagaacaacagcttcctaccaagtggtatgtctacagcacagccatggtcaggttgctccagtctcccccttcagcaggctggttcgtggtggacacacaaggagcctttgttagatgcataggcaaaaccttgaccagcctgctcaagtcacctccccttccctcggggcatttcagctccctgtggtcctactgccaactggctagattagtggttctcaacctgtgggtcacgacccttttcagggttgacagaccctttttacaagggccacctaagaccgttggaaaacagatatttgcattacatttcataacagtagcaaaattacctttatgaagaagcaatggaaatgattttatggttgggggtcaccacagcattgaggaactgtaattaaagggtcccagcattaggaagtctgagaaccactggtctaaactgtccttcctgcatcttcccaagagcgaagaggaagcaatctttcacctttgtctaggtggaggtcccctgtcccttaggtccctcctcttccctgggctcactctgacagctctggtagccagtggttttcattcacatctcagcagctgcaggataaacttggctcctcctggcctcgctacttctctaatcagcaccggggactgtgagcaccgagcctaggcaaaaacagcgaggggtggaatttgagggacaagtcaaacacctgagctgagtgccaggtaaactcttcctctaatggtgtggacctggacagttcttcgaaggacagagtccctgtttgatgcttctgggaaaatattcagttgacctggaaggcttcgtactctgttaaatggataaagagggacagaccacaggcagctctgctgcagccccaccctgcccttctgatctggcttgagagctaacttcgaagccctctgcagtggctgtgccttaaagagacaaagtagtgctgtcacctacggctcagcagtgaggtcgatgaagctgtgctgtagatatggaaatccccagtatgggtatcccctccaactattggcctggcagaagtcaggccctgaagagaccacaggaagctgacaggcacagctcggtggggagatggtgtccaagttgtagacacgatccattaatccccagatgccagctggctcctgggtgcctctggccgaggtttcccaggcctgcctgctgagcttcatcaatccccagagagcacagaagtgttggaagaactcttaacaaattacatgacgcacgctctgatatgcagttcacacacagagaaactaaggcagacagttgccacataacttgttccgtgagacacagtggagcagaggtccggctgggacccagtcccttcttcctgtccagcatccgggacacaactgtcctggcctgctgaccccgccccccgccccgcccccagtcagcacagccgtggagcagtgtctggcttccagagagggcttcttccaagatggcgcctgtccttcccatctcccttgtgggggcacccaaacagccaccagccagtggattacacagccagtggattacacaggaaccactctggtggtttgaagcttaagagttttaaaatattttattagtagtcaaatatttaaaatttttcccatcatgctctttggttaaggggaggaagccctgaagagcacagatatgaaaagcctgattgccaggctgaggtgaggataattctgctctttcgatgtgaggtgttctgcccacgtgataatgacatgttgttttgaaacttctctgtagaaaactgtgatttttttttttttacttcataactcatttgtaataaatggagggacatacacccctctgactaaatgggggaaggtttaattttatctctatgtatgttacaaaagagtgcattgccatgcatgttggtgtacatcaataaccctagcactctagaggctgagggggaagaggctaacctgggctacaaactgggacagtttctccaaaacttaaaaaaacaaaaacaaaaacaaaagattatgttaaatatgtgtatcataattcccttctacttgcatatcaacctaaagattgtatttgatatcaaatgacttcattatcctaatagatttttaattccaaagagtgtatacaagatagtatacggctgtaaattgacttttccagtctaaacggccagagcaagggcagacagaggtcactcccaaactgcctcaggtcccacacgggtaaagacaactaatgaagagccttcttgttcccacccacccagtagcaggtctccagatgtgtggtgtcgcacacactgtgtggtgcaggtctccagatgtgtggtgtcgcacacactgtgtggtgcaggtctccagatgtgtggtgtcgcacaagcccacactgggatgcagggttttccttagttcatatgaaagggaaagcggtgtgcaacggtggatgccactgtgcagggtcctcccaggtcccttcagaccatacctgtcttagacagggtttctatccctgcacaaacatcatgaccaagaagcagttggggaggaaagggtttattcagcttacacttccatactgctgttcatcaccaaaggaagtcaggactggaactcaagcaggtcaggaagcaggagctgatgcagaggccatggaagggtgctgcttactggcttgcttcccctgtcttgctcagcttgcttttttaatagaacctaagactgccagctcagggatggcaccactcacaatgggccctccccgcttaatactaattgagaaaatgccnnnnnnnnnnnnnnnnnnnncacacgggtaaaagacaactaatgaagagccttcttgttccccacccacccagtagcaggtctccagatgtgtggtgtcgcacaagcccacactgggatgcagggttttccttagttcatctgaaagggaaagcggtgtgcaacggtggatgccactgtgcagggtcctcccaggtcccttcagaccatacctgtcttagacagggtttctattccctgcacaaacatcatgaccaagaagcgagttggggaggaaagggtttattcagcttacacttccacattgctgttcatcaccaaggaagtcaggactggaactcaagcaggtcaggaagcaggagctgatgcagaggccatggaaggattgcttcccctgtcttgctcagcttgcttttttatagaacctaagactgccagctcagggatggcaccactcacaatgggccctccccgcttgatcactaattgagaaaatgccccacagctggatctcatggaggcatttccccaactgaagctcctttctctgtgataacaccagcctgtgtcaaattgacacataaaaccagccagtacagtacccaatacatacccatatgtcactgtggtctgtagaccacagagccccagagagcatcgtctggagataggagtccttttctgtattgcacctctgaggtgagtgcctgtctaggaaatggaaggggtcacatggtggctgattccactatattttatttggtttgcctagaacataggaatctaactcaagcaaaattcttgccaagcctttgctgactcggccagttcttccagcatgttctctccacattccccactttaaccaaaaagttttgatagctgctattccagaatctccgaaaagttgggtttgggggtgttacttagtcggtagagtttttgcctagcatgcatgaacccctggggtttatgcacttggtgaattcaggcacagtggcacatgcctgtaattgcaacacttgggagttaccggaaacatgatcaaatcttgggtcatcctcagtcacacagcaaatatgagagcagcctgggccttaccagaccctgtcttaaagagcaaataaacaaacgaaatcccagaagagttgtgagaagcataaaggcatcccatctcgccttcccgtggactaccgaccgaccgaccgttaatgtcgcctcccctccttcatctgaattctttcctggtctattggtgaactgcattgccaaaacaatggcccttttctgccagatacttcacaggctgttcctgtcagacaaagactttttcatgaccacaatacaatggttaggatcagaactctgagtcctgtccactaaggtacactaaatctgtgctataacccattaaactctgcagtcctacagtcttcccagacacagggatcctgtctgtctgttaacctaggacaggtctctggcctccgagaatcatggccttgactgtgctcagggaggacctatgtctttgtagtcagcttgtccccaggtctggctccaggcatgtgttcatgttctggtcatcctaccaggaggtggtgctgtccttggctcctgggttgattgtgttacctggttaaaggggggtgggggggggctgcctgctctccatcgtcgagggtttccctgtgtggttctgtgggaaggtcactggaagctaccagtgtttggccttttaccccacggtctccattgatgcttcatgcccgaaacggttgttaatatcaaggttaccaaatcatttcttaatttcaccattccttctaaatatactatttggctttatatcataaagaataatcttaggctagtgtgtgtgtgtgtgtgtacctgtatgtatatatatgtaaatcatgtatgtgcccttggaggccttatgggtaataggaaccaaatctgtctcctctacaggaacagggagtgctcttaaccgttgagccatccgaccagaacttttgtcgtttgttgtgttgtttgtttgagataaagtctctcactggacagcagaagctgattctgaccttgtgatcctcctgtctctgcctctcaagtgcagggattgctagagtacagaactgtgaaaccaagggtctcatgaatgccaagcaagtgccccaaaaccaagccccagcccctagaaagggaagtccttgtcactcatctgcgtgcccttgaacactcccgcttgactgaataggaattccaagtaagtgaaggttatagcttcgtgtctggtgcaagtccctagtgttctggaaggctctgccccaagaaagtatcttctgggaagcatgtccccaggtggcctgactggagagaggctgaggccatgtgtgagcctgttgaaggtcctttggggtcatgtctcaccacagattcatccttccatcagctccaactgaaaaatgtgacccaagggaggcgctgcctcagtcaacgccattttgcatttcctctccttcctgggatggaacaaatggcccttcagggacagtgaacctgtcagtaatgaaattgtgagaggaggcggctgtcccgagagggaggctgctggggtgggggtggctaatggattaatgtagtggccagcagagcctgggaattcctggctctccccagcccatgaagcccaaccagcccccaagcctgttagagccccttgagatcccatacctgcagggcatttgcttcacctaggaaaaacccagagccctccagtcccacccataacctaagatatcctccatgggtgttctgaggctgccagacacacccctgtatccatctatcctcggaggccctgggtaccagattggctcctggaacgtgcctgcctgtacctgtctctcaggcactatgtttgagatctcagggtcacaacctgtttaccagataaaatcctctaggttaacctgggagctagctgcaaagcttccttccttctctgagagtgtgcgcatctatcaacattggccttctgtctccacttatgagtgagtctctggcttggttgcaagcagaccctctctctcatgtcttatatggtctccctctctgtctcttgctaatgaacagatgggactggaagggagtgatttgtgaggatggtgggcccttatacagtaagtgacaaccagagagcaaggaggggggacttgagtgtggtctcttcatccacagagagttagtatagacacacatagcccagaaccagaccctgacccagagcagagctacagtttctctgaagaatttgaggtgattcttctgctccgcttctccatctccacaccaaccactggtatctctgcagctcacatgcacacgtgcaaacacacacacatgcacacacgcattcacacacacagtatctctgcgcctctcctcttacaacgcttttcctgtcctgggtgtcttcccaatccctctcccttccctgactacatcctcagagctcaccagatgtcaagccctgctattgttggtagacttccaatgacctaacagtgctgcctgtattttttaagattatgaagtcggggatattgtcttgtagctacgtgagatacaccggatgctgataacctgagtcagaggttggaaaggaatatatggatggatgcaatctatggtctcaggcaaggctagcccagaagacatactcatttctttcagcagttaaagtaccaactgttcttgcagaagacttgagtttggttcctagcacccacgtgggacagctcacacctgccattgtggattaaacaggcatgtgggtgccaccaccggtagcaagcacttctatgtgcgtacatcctcatcccctcattcacaggagacctgtccccagacccccagtggggaactgtaactatactgcattttctctgtgctacaatttgatttgtaaactaagatcaaagaaatgaatagcagttgataggtgagaacccttataaaaaatggattctagtaacagctctgtgtgtcctattgtgccatggtctccctgcatgtgtgcctgtgagatgacaaaagattctgtgatgagctgaaggaagcctggcttttgcagtctgtggttccactgcaaagctagcccagacttaattgttgttcaatttcacatatagatgctccatgcttggtgtagttcttagctgccacaaaaggttttattctctttccttattaagaaaaaaaaatctaccttttttgcttagctgttccttgcatcactgcgtggcctgtgtatgagctctcaagctatgagataatcactaagaaaacttcttgatcatagatagtacagtcttctaactattaactacttggtatctaacgggtaggtagtatatacggtatggatatatcacagggactatttatgtcccagttgggacagaacaggagaatagcatgtgactgaaaccctgtgggttgtgaactctagggtttttcattttgcattttgcttaaggtgtgtgacttaaactgtggagagccaccccgcaggtgaggtagcactcgtagggtctggagacctggatacaagcaagcaagcaggtataagcaatgaagagaaatctaacatgctctctccagtccatgggtcacatgtgctgaccacacacctctgtcggtagcgcttctcctccagcctcaagtatgggatggaggcagagactcaaggggttgaggcatgcactgatcagagagaaaggcttagaatggagggcatgcttggtatctcctgaatgccagcccacctggtcccctatgggggctgttaactgttggaagaattacacaaggagtcacccctggaaatatattctctatttgtttacatccacagatacagtgaggactgagatgttaaggaatctgctcagggttacagagctggacttgtgctgtgaagatttgaacttagggagtttggttccaaagtcccaattttgaataactacatagctcaagaagaataactatatagctcaaagatgcataggccttgccaagcagcctgcagcgaggggccacagcctgggtttggagacagcaaagtgtggctgggccaagtggaagggtgagggccttcccctggaacctcgccaccaggttcacgtggagcctgacagctcccaagggcagccacgtgctcttcccatgacatcataccgcctcggaactttgaggccaaggattcttggaatgcttgattcatcctggaacaaaaataatactgcgtatttataacgtgcctttgtaccccaaaggctttcctgggctttatttcattgaaagttcaggctagccttgtgactacacaggaatcagagaggcggcaagccaccctgagcagcaccgagcaagattcccactcccccccccccccaaacccctcaccnnnnnnnnnnnnnnnnnnnncaccaagcagagtatccatccacaccccccccaacccctcacccctgtgccacagctagaactgcgtggcttgccagagttatttagcaaattcttgagaaataaggtgcccaagaaccctgatttccaacgagagcgagatgacaaacagggggtcatgagccaccgagtttccctgggaaagccacttccttagcttctgccctgccagagatagagcccacagttctgcatccccctccccgcaaggggcaataatgaagccaaagggccaccctgaaacttggccctggctgtatcccccaggctccagccacaagcaccgcagatgagatgggcaaaagattgtccccagtgcaattggaacccaaggccatgcatggctcctgtggtttgccccagacacagtggagcccaggctggaaggctgttttcctcacaagccgtccttcccacaggccctagcctggctgcccctacccttggtgcctaggccttttcttctgtgtgtctagctcttctgtaccccacattgtctcaggatgacccgcagctcctctccctgtgattttggccaaagtcctctggaatagtggttttagtgtctctgcagcagcttgccagctcccctgggcctcgagatcctggaacaaacttgaaacttgggccaggaaggcgtagtggtcaagactgtatatgcaggggccagactactaagttctaagccaggctcttctggccacttgcaaactaggacaagaaaccctctcatgccctgctgacctcactgcaaagtggagtacgcaatggtacctctccctgagggtaagtggaagccattcctggcgagctgtacatcgagtacgatggctggttttgccactgtgaccctgctcccccgaagtattgagttggctgttacctttggaagccttctgagcaggcctggctacagtgtgttcagcctgcacgctgcataggacaatgtgcttagaagggcctgtggttgactgaatgctaggctgtgactgtcatgatctccaaaattctttgctctggaccccacatgttacatgcaggcctgccttcagtcctgagagtagactgagcccttctctctgcttgcttgcctttgtctcttgtctctggtcagagctacttctagcttctgtaactggtggactgatgtctctaagccctgatataggcattgaagtagcccacttgtgattcacgaaaccccaggacatccagagctgctgtttctttgggcaaccacagaacaggctggtaggagtcagggtcaggaggacaggcatagacagtgaccatggtagacatcaggagtagcagggctctgggctgacttaactcctgaagggaatggggcaatgctgaaagattgcacaggaacactgaacaccgtctgccactcacacacagccctcaaaggatgcttcactaaacctggtgacagcctgaattaacctccaggtggagccaatttaaataagggtgacccgaccacagttggggacaggtgttttctctggctacacagtgctcagggccagtaagaccctccacaagacaagaacatctgttggcctggtaaccctcaggtattcaagggttcatttcccacagtgccatgtcacacttctaaggagactgccttccctgcagtaaagataaagaagaaagccacaaagtatgggcaagtctacagcacagtgtcaggggaacaggagggttccaatgcacaatagccttcatgggggagcaaagcatcatgggagttcctggccgagtttcccatcatcctgtaaatggaagctggagtggctataggttggctctttgtttctgggcctcgggtaccaactctaggcaaagcagccctgtcctgcagggaaatggctggaccctgagcccctgagtttcaccacagtcgtgcaaaggaaaggtcctgtagaggtaggcaggaataaaggggcctgtgctgtaacgagcaatcatcacttttcctgaagacaggaaacacaagctcctgtgtagcttccaagtcactcgcccaggaattttactttcagaatttttaagcagacctacaaattatgtggtaaagggtcccacatggagagaactataataagccaatgggccttggactatctgtttgggagctattatgaaattaaaagaaaaaaagaaagggggagagagagagagagagagagagagagagagagagagagagagacatttgtctccatttagcctgatgttaaaaccatttttaaaaaacaaaattcgaagttactctctatacacctacctcccaaaatgcagctgtggtgtgttctgggaacatttttccccctagaagagtttttagaacaaacccaaatgtctgatttcagaaccgaaagaagacagaatcagctaattggattgtaggagcatgctctgaccattttcattccaaggccattctttttcttctagcagcaggtccatccagggggctcacgtggaatcttgctcttgtccccccaagccatcccttcacctgggaacgagagtcagatcaccccatgaaaaggcaaagcagtcgacactcagccttggacacttgccctttctggcgactgtgctgccaagttgggtgtatgcacagtgctcccccaaactggaccacgtgtacacgcatctgacaatggatgcagccttcttgctcacccacttctaggagtagacgcgactcaccctgacctagccaaacccaaacccacaggtctcgtggggagcagccagctggcccctgacaaaggtatcaatgaaacctagcaccagcaaacactgaagagagcatgctggctttggccagctcacccagctaccactaatgaatatttgtgaatggccagagcagggagccctgggccaccatggttggggaacagggcccaagcctacgtctgtccatgctaccgatggccctctgggttccttgccaggcagagtacatgggcctactgcggttgtttccacaaaagtctctgggaattcagccccgtactcctgggaaactggacctgcgacgaggtgaggggcagacggaaggtggccttcctggtcccacgatgaataagtagataagtctttgaaagcctcgatgggcttatctataaaatgagaagaaaggaggctgaggactccgctcaacaattgggcacttgcctagcgtgtgtaaggatttgagtttcatgcccagcatctctctctctctctctctctctccctctctctctctctctctctctctctctctcacacacacacacacacacacacacacacacacacacacaaggaaggacccctagtccacctgcatacacagaagacaagcccagcagtcacttgtcctgagaagaaggcaaacttcatgccgcatcctctaatgctgcctgtgctcctgctcagtttcccaaggcaaagctgagtcacctccaaagctctgtatccctttggacttctcttagctggggtgactgttgctgcagttaaacacccacggccaaagcagctgggggaggaaagggtttatttggcttacatttgtcatcattgacggaagtcaggacaggaactcaagcagggaaggagcctggaggcaggagctgatgcagaggccatggagagatgtttcttactggcttgctcccccgatgacttgctcagcctgcttcttatagaactcaactcgggacccagggatggaactacccacaatggtctgggccttccccatcaatcactaattatgaagatgccctgcaggtttgtctacaaaaccatcttaaggaggcattttctccattgaggctccctcctttgggatgactctagcttgggtcaagttgacataaaactgtccagcacagttaggagaaagggatccaatggcaggcaacagcatcagagacagtgtctgctccagttgttagagaacccacatgaagaccagggcctcagtgggagaagacctactgtgactggatgtcccaagggggggtggtaccaagtgggggggggctttcccctctcctcagagaaggagggactgggaagagaggagtgatggggggggggctgtagttgggatgtaaagtgaataaactaattaagtagaaatacttgccagcacatagtagggctacttagcttccctctagtctgtggatgcccctctttactcgtaagacaccatcacccagcaaatatgagtctggggacaaccactacagtcagcacactctcagccagtaccattctctcagggttgggggacagggatggggggggatcatattggccatctcaggtcaccccacatctccaggtgaagaatagtgagaccagggtgaattttttctaaagcccttgatggccagccatgtagaaatgacgtcctccttcaagaagacagaagtcttttgccttttttcttttcctactcagagaggtagctgcaggacnnnnnnnnnnnnnnnnnnnnnnnnnnnnnnnnnnnnnnnnnnnnnnnnnnnnnnnnnnnnnnnnnnnnnnnnnnnnnnnnnnnnnnnnnnnnnnnnnnnnnnnnnnnnnnnnnnnnnnnnnnnnnnnnnnnnnnnnnnnnnnnnnnnnnnnnnnnnnnnnnnnnnnnnnnnnnnnnnnnnnnnnnnnnnnnnnnnnnnnnnnnnnnnnnnnnnnnnnnnnnnnnnnnnnnnnnnnnnnnnnnnnnnnnnnnnnnnnnnnnnnnnnnnnnnnnnnnnnnnnnnnnnnnnnnnnnnnnnnnnnnnnnnnnnnnnnnnnnnnnnnnnnnnnnnnnnnnnnnnnnnnnnnnnnnnnnnnnnnnnnnnnnnnnnnnnnnnnnnnnnnnnnnnnnnnnnnnnnnnnnnnnnnnnnnnnnnnnnnnnnnnnnnnnnnnnnnnnnnnnnnnnnnnnnnnnnnnnnnnnnnnnnnnnnnnnnnnnnnnnnnnnnnnnnnnnnnnnnnnnnnnnnnnnnnnnnnnnnnnnnnnnnnnnnnnnnnnnnnnnnnnnnnnnnnnnnnnnnnnnnnnnnnnnnnnnnnnnnnnnnnnnnnnnnnnnnnnnnnnnnnnnnnnnnnnnnnnnnnnnnnnnnnnnnnnnnnnnnnnnnnnnnnnnnnnnnnnnnnnnnnnnnnnnnnnnnnnnnnnnnnnnnnnnnnnnnnnnnnnnnnnnnnnnnnnnnnnnnnnnnnnnnnnnnnnnnnnnnnnnnnnnnnnnnnnnnnnnnnnnnnnnnnnnnnnnnnnnnnnnnnnnnnnnnnnnnnnnnnnnnnnnnnnnnnnnnnnnnnnnnnnnnnnnnnnnnnnnnnnnnnnnnnnnnnnnnnnnnnnnnnnnnnnnnnnnnnnnnnnnnnnnnnnnnnnnnnnnnnnnnnnnnnnnnnnnnnnnnataatcatcaaagtgaagattgatattgaacttataacaaagaagcaaatgtttgatataaatccaatttgtttattaaggataattgcacttaaggttgtgagagcggaggtagatctcaaggtatgggttcattcttgaaactgtaatggctttctcttggtttctgcaccactgtatctatattaaggggcacgtagctattctcaactgcacctccagtgaccccagggttcagaaggcagcctgggagggaccgaaactggccatagtgctgtgagtggtaagacaatgcctcatatccatgcgcctgcccctgccttccaaccatgcagcaagaccttcccatcttggttcctggcacagagcgcagctctgccactggctcttctctgcttacaaagcactgtcctgaagctaaggagcagcgctctgcctaaagctgcagaggtgtcagcacagtggggctctcctgagacctcacttctcagtttgcagatgaccacggatgcctccgcatgggtggcatctttgtgtatgtacagactgcttctcgttataaggacccaagtaggcttggattcaggggcacaccctggcaacatcatatctttaaaatcccagttggctccagagagatacattctgaagaatggagtgagggcttcaaaacgtgaatgttatcagataatgctgctttcaagggacatagctggaggagttgggcagaggctggggggctcgtcacatcttctgctggtccttttagatgcttgttccgtattacatacacgggcacaccgtgtgccacggacgaatcgctgctttttagagaaagttcaacttccattctctctgatggctcatgggagggtcgggataactgttgaaatgatccagactctgatattgtgctccaacgtttggatgaagggaccctaccagttcactatgtaacccctcttttccacctctccattctccttcgtagacggcagcaaagacctccaggagggaacaagccccaacagcatggtgaccatcagccaggcagtgccaaacacaacagggaccaccagaaatcttaccaggggggctcagggccccacccctcggggaggcccacacaccatggctacagccagaaccgacgctggcatcacggcaacatgaaacatccaccgggagacaagggagaagcgggcagccaccgcaacgccaaagagaccgtgaccgttgagaaccccaaacttgaagacggcccaggggacaccggacacagtggccttgagcccccctgcagccctgacactctgaccccagcagcttccgagagaccaacccctcagctgtcaggggggccggaggctgagataaagcataaagacactgttcttcctgagcgtctcagggagcggcccaaaatcaccctgctccagtcttccaaagacaggctgaggcgaaggctgaaggaaaaggaccgggtaattgccttttctttgttctctccctgaggacagctgaaaggtcggcacttggggggtgggctttgggtggagcctcgtgggtcgagacaggggctcctctctaaagggaagagaggctgggtggacacaccacaccaggttgtcaccgccatgggtagccagctgtacttgaaacccttccaacacatactgttcctcctcttctgccccacaagcggtgttggagacgccgggaaatcactagatgccgtggggaatggagttgggtcctatcggtcctgctcagggagtcttaactttctctgaagaggtggtctagaggggactagaaaagaaaaagagcggtcacttctgaccccaccctccccgggtcactcagttctcgagtgggagagcagctgtttgtgcaccttaatcccccccccacatggtcagaagaggctccagtgttctcgcagtgtccccgtgtcaccccaaggggaaagtggctcagagaaggatccacctccccagtgtgcacagccacagagagctggagacagagccgtacctccataggaagctcccaagttaagaacagagggccagcaagcttgggccatgggtctgttctgtttaggtgcatacagtttaagataacctcatgccattttctgcctttccactctacagtcttaccccagttactggacactctcctacgaacataaacaagttgggttgggtttgtttgggttttttgtggggggttgttaatttttctcacaaggcaccagccatgtgaatagcacattgaaagatcttagtgtgcagtatctgtatgcatagagacaggcagtatgggatgctaagccagggccaagtccacatggatccgttcacctaagaacatggcggtccgtgcatttagagcagacacctggtagctacacccaggccaccccagcaccactacatgtgttctggatcctactcaaccccagcttggtctccctcacctcatttcctctttgacccagttttctctctatcatcttcatcttttaaaattcccactaaatcatctctaaataaaggggtctgctggatacatgaggggtaaatgtgtatatgggaatcctgggtaggggctagaactgacaatgtcaaccagccagggcatcagaggagctaaggaaaaaggtctgtgaagtgcagtgtggcgtgtggcgtgtgggagtgacactccctcacatccttctttctggctctcccttcttccttcaggacatcccgaatcccactgagacttcagctccactgaggtgtgttttatgtgtcccccatgtcccccaggacgaagtggcagtagagacaagcagccctcagccaagcaagatggacaggctgatggaaatccttaacagcatgagaaataacagcagcgacgtggatgccaagctcacctccttcatggaggaggcgcagaactccaccaactctgaggagatgctgggggagatcgtgcggaccatctaccagaaggccgtgtcagaccgcagcttcgccttcacggccgccaagctctgcgacaagatggccctcttcatggtcgaggggaccaagttccggagcctgctcctcaacatgctccaggtaaccggacaccgacagctgccgctccactccccggcccctccgactgacgacgagggttattgctagagagagggctgcaagttctggtggcagatgagcttgtcccaagttgcttcctcccttgcctgattaattatagaaaataagcaggcatcaaggggtgagagatgcgcggctggatttgggtgtgtttgtgtgagcgctccatggttacagaggaccaatataattttataggtgctttttgttcaaccgccctctctctctctttctattttcatgataagaggctggctattggccctgtgctttgacctctacgtgtctgtgcggtcatgaacttgctgtggacctggctctccccgctccttctccctggctctcttccccctccttctccctgacctcctaacttccccccttctccttttccttctccgcctccctaaggacagccctcaaaagcttgatgtctctacccttgtaaagcaaggatggcaaagccttgtgaggcaggacgacgacagcctgtctgtttgatgcactgaaacccaaagtagaaagaaagtgtggcaatccaagattttcttgctgcctggtaccttcccacccaatctgcttcccctccagagagcttcccctcattgtcttactcattgtgtgccaaggaccagtgtctaaccacagtcccattgtagtgtgtgatgagtgtgggccagtgcctaaccacagtcccacaggtgagtgtgtaataagtgtgagcacacgcgctcacactgagtccgttatataagtacctgctgtgtatggtaacagttgactggtgagcccagatctggcaacatcggggaagaaatgacagtggaggatggtgacacggtgaccgtatcaggcccaaaggccatctttggagactctggatgggaaaacaatatctttcctgttattttatacaacagagcccaatttagatacaaattgtgtcatcaggcctacctggtagagcagttccttggaagtgaggaaagagggaagcaggggacagagtttaagggaccaccagcagtcatggcgaacatggtgaccatataccagattgtcctaccagtgccacttctgagagtcccctcataattacactcagaattatgacagatgtgctcagggcactggtcacctggttcatggtctgcagtgttgtccctaaaagcagaggggagatccctgctggcccacctgcctgtggcgcactgggccccgtgcctgccgtcttcttgtgtgtgcgtctcgctgtctgcaacctgagcctccctggccagcctcgagcttctcgccagctccaggctctgatcgggttgccattcctggatcgcccattgctcccctggtgatgaattcccgcattacctgagggatttgcacataggcatgttcctcgcgggccggaatgtcctgggagagtggagagggtgacaaacaggcaggagaggcccgtctgccgtgcatcaccaggcacgggggagtcaagggcaggactggcctcagactcagtttggtgatttttttttttcttggagaagggtcagaaacagagtacaggagtacaagctctagaccgtggctgccagccgccagcaatccgttcaaccccacagcagacaggcacacaggcctgtggcacccaggaaatgagaactgtctgcagagactaccccaagatgggttatttcatcaagaactcatggcaagaacccaatggcaatttcaattagtgaagtcctactgtgcgccctaactagcatgcccatgtgaagggagcannnnnnnnnnnnnnnnnnnntggtccaggtatcagcagtcagggccttgcgaatgggctcccagtgcccacacacacacacacaccacacacacacaccacacacacacatacacacacacatacacacacacacacacacacacacacacacacacacacacacacacacaaacatacacacacacaccgtgagatgctcctcttcttactgctccaaggcctggccctgaatgaaggagtcttaggttctcctgtccttgcaaaccaccctcccttacgctgtcactcagagaatgtgagtgactttatgaccagccccagaggccagcttgtcccagggatactcacatcctgccccctgctcccctccaccaccactgaccctctggctgcactctagtggataaacccctacatcttacttagaagtcacttctacccaacgctcagcccattgccaggggccactcaaactcagacaccactcccctgggagattggccagagtctctcgctctctgtttctgcagcattctgtccttctctgccacagcacctgtctctctgttctgtcatgtgactagcactgaccgggtgtccaaggacaccaagcagcacctttgaagccaagggtttaaacgtatacagcaaagacaggaactttatctactaacctacagtgacaaaggaatgcgcgttaccatcatcctgcttcccccggactctgacaggcaggcaccgcctctgctgtgtgcaaatctgtgtctggctgtctgctcagtaccagtactgacaggtcacagtcatggagcaatggcgattgcaagaggagggaaccagaaacatctctctcttttctcccagtcaagaacagaggcccaggtggcaaacaagactcacattgtaagctccaaaggtgcaccctcctggtgaccatactagtggggaaaggcctgtgcctaactggacgatttgtggttcctctataggccatccccatcacccacttcctgtgagccaaggtgggagccctccgaagggtagaaccagaggctttgccttgatacttgagcctctggtaagatcgtctaaagccctttaggctcatagaggaatatcttagccgtgctgggtgaggtgcccaagtacccatggatccctgatcacgtggctgagaggaagcttgcttatctacttgagcctcttcaggctcttccattcctccctgcaaccaaggagagcaggcctttctgagaaagtggcctttcatggtcacttgccacccaagcagggaagtctaaatggaggagcaacagacctggggatccacgttccctcttcacacctctaaggaagtctgtcttcaccacccccagaacccctccctcccttctttctccctgaagttcctggtctccaccggctcagtcccacttgaccctgggtccccagccagccccatgttcagcctggcaagctctgagccagtcatcctggtgtctgatatggctgccatacaggctctgaggcccagcttagtggcatggattgcagaggaaccaggtgtgaagtgcctggtacacacccctcccggcagctgtctctggatatggtcctccctggctgagtgctcttgcgacacgggctatggagccctcgatgagtctggagacatggcagggagaggggcaacctttgatgtggtgaatacttggcaatggaagtccaagactcctgccaagttgagcttcagcacccacaaagtggaaaatggggtgtggaagattgtcataggtcctccccatatagactctctcttgcgccatgtcaataaaccagggaacactgattccctcatgagttccataggcctcagtggatgcccatcaccaattccacagtttagcatgtcagtttctacatctgaactggctctagtctttatcttagatatgggccctttcttagtgtgctcatatgtgctcaaaatcctatttaagtgactattccttaaatgtctattatatgcctatagttgtcattagtatcctgtattcctaccaaacttatagcggtgctgccaggctggtctgagccaccctttccggagaggcattggatagtttatacgggaagggtcactttaatgtctgggcaagcaaggcgacagactcttggcagtatggctctccagcctgagaatgctacacttcagacctctctgttgtggagaacagagaccctcagccgttgtctttggggatcacatggagagctatggctttgccctggggtcctcctcaggtctgggcatagacctggacattgtgtcgtaaagaactcatttgggccatgtgaagtgaacatcactgtcaggacgaaggcccagagacaacaggaaaacctcacccttgtcttttaccaactggcccctcacaccaggaaccagctaaaactcatttctcaggtgctaggccctttgctaatcgatgtggaggactcaaactgagctggtggaaaaacaggagagggaaaccttagctgttggtagagtgctttcacctccaaactcgttttcccttctgtgaggagctgggctcggcccatgttcctcaccatcctccaccctggaaagaggagagaccctcttctcctctcccacgggatttctctgtccctgctctgtctaaaccttctgtttccttcttcttggcccctgccatttgtccgcatggtcattatgtgttttaggtgaagggtctccctttcagccccagtgctgactgggccacccaggagaactggcgacaaccacctctgtggctctgccctgcccgtgaggctcccagatccttcatgggccgaactagccagttctgcgcattgtttccttctttagagactgccggctaccccagacccaagcaaccagaaaagttcccttgatgctcaacagggaattgcagttcagttccaggggagagtaagggctccagtttcatggggaaggaagaatgagtgtgcctctttttatgggaccttaggaatgacaggaatcaaaggcttgagccccctccacccagaactgcctggtcaccgccctctgccttacccttgagcttagagagggctcttttgcccagatctgcttgggtagtacaagttcaagccctcgtctgttgaaatgtgtgtgccctgtttagccgagaggtgtctgcatctgagctatgcagagagaagtattattagagcaagcatcagtgtgcctgtaactgaacccagctctccctagcaactgttgctaacaacacatctaacagaaggatgtgatacctttttttttttttttttttttttttgaagagggaggggggaaaatctcttcatctaaccaagtcataaacacagccgggttgttgtgcaaaggcaactggaaatcaaagtttggcacttggccagatttcaaaataaattgttgtccactggtaccctctagaatgtggtatctcaaaggggccggtctcagccttgagaatgggcgttcggagtgtctggccagatcactgttacagcgttgtgtttgggcctttgataccgagagactcagttggacggtaattctatggggtgtctgggaatgcctttagctctataaggattgctcagatcctctgatctggctaaccttatcaggaaatcaaagtcttgccttaagccccaaagattatgtattccctatcacatcccttagaaatacatggaagcctgctttctttcagtccacacctctgtcctgagcccaagtcctaggcttaggtggaaagaacccaggctgttcctttaactgattgtaagagaaagctctcctgccctctggctctcttggtttctgaaaaatctaaaaccattccctgtatcttaaatccagcattcgcaagcctcatattctacagaagaaagggcagggctggccgtggctctggagtggagcagttctgatctgtagacttctcaaggacaagggcgctggctgttacccttctcaggctcctggcaccgtgactggtacacagcagatgctcagaaaatgcctcactgccctggaaagtggtagagcattgagtttgggaccccagtgctttgcgggacagaagcccattcctgtgtgtgattcttagatgggttccccatatcgaaagagagagaaagacagagaaagtagtttagcaaaagccacagctctaactgtctggactcctagctcccatcccattacccaaataggacaaagattgggagcttagaaatagccattctatgaagccatctatggggactgtaaagaacaccccggggaagggcatgattgcctctgcccctcagactttggtaggacagagctgcctaaaagaacactcctttgtaccccagtccatgtcacctccttacactctgtccctctgcctccctccctgcttgctgccacaccttccatggagcccatgtgcattgcaagcatgtaaaccaatattagtgctggcttggctgggcatgcccaggagagaagtgcattgttctgaattctccagagctggagcaggagccttggactatcaacacacacacacacacacacacacacacacacacacacacacattcgccttcaaggctgctggagccagcagggacaggacacagggctagccggcagtgccagccgttctccacaagcaaaccacagagggtgatttccccaggcccaagagtgtctcattttctcaaaagtcaccggcctctgagcaccctcaggagtaggctgtgtccatgctgaaagccaagcatagggaaagcaatgcagagctggtacactcactggcagcaagcttgcttcatgtatcccaagagaccggtggtcacaggaacttggacctttgcagagtctgtggcaggctgggtccctgcctgagggagctgatgtctgtctccatacccagcccttagccatgctggagccagagtaggtcagaaccatataccttgcttcaagtgtcttgtctgtcctttcgagggagtgagtagattttatttgcttttttccaatggtatatgtctccttccaaccttattgagcacctgctgtgtaccacatcctctggtaggccaggtgtatgtatcagttcattacagactctctggtccccttatcactgttgaaaccagacataggtcccagccaggtctcgggtactcattcaaggaaagagatcagtatttaggccagatctctctggctgttcagttgtgggagtggaataaggacaaggtgacttcttgaagcactgagtccgaggctgtggacctctgcagcactgagtggggcagagcaagtgatgatctgagcattaaaacatggcttggacgcctggctcaccgacacgtgccgatagtcccagcgcttgggagatggaaggaggactgtgagtctgagaatggcctgggttatgtaataaagttcaagccagcctggacaatagggcagcacactgtctcaaaccaagcaaaactaggccacctggaacaaatagctaccctttgagtcccaggtctctaggcaggaggacttctactgtggagccagaactaagaccctagggccttaacctagtggtatggattcctgctgccgcctttgctgaacctgagtgctcagcctcatcttggtacctggtttctgccctgggaaagcccctctaagctatggtagagactgaatgagtgaatgtacccacagccctcaactcaaatccaggccacagcggtggctgccccatgggtacagaggagaacaggaggcccgactctctccaaacagaggccacaccgggcttgtgactcacctctcacttccatgcagattcagtatggggtaagacaggtggtaggagcttagaaaacaaggatctcaggagaggcctgaggacttgatagctttttcctttccagccacccaggtctccaggtcagagaccccgcccccaaacttcacctgggtcaaaccctttctgttctgttttgtttgtgtttggccccggggtttcactgtgtagccccatctggccttgatcgggcaatcccaccccccttctacgattagatttgtttaagctcttccttatctcaggcttgtgtctttgggacaaagagttatgaatgtcctgcctccaaatcagtgtagtagttagtctgccgttacagtaggacaaagcagccttgggtagacaaaatagatggcagtcaggtgcctgccgctgaagaggagcacatggtgttctgtttttcgagtcactgggcccagggagctttccctggtcaggcactatttcatcaagacccatgtccctggccgtgccatctcctcttccttgcacatcctcacctcccaccccggctctgttttccctgctaaatcccctgagagaacttggccagaagcatccctgtctgaggctgccaggcaggtcccgcagataagtgggttatcggagaaggtggctcgggtgtcccaggccccagagggtcacccctggctggctggcagttcacccccagcacctcctcccactgctgctccctcacccagccaggcaggcaggagacagcagatcccttcccaccatctgccccaggcagccgctgggaatccgagctatgctaagccactccagatcagcgcatctcagccctgcctgggcaccgccgccccagacagggcgcctctacctgctgcgccaccactggaaagctggcaccgactgcccagtggaaaaaatccccctgcgggttatgtaactgctccccagcctggccctggctacccaccaaggctggccacccttaaccaaccaccacagagggggagtcatgtcttgaagggaagggtctctctttcaaaaaaggaagcaaatagttctgttattgtgagaccctcctctgggtcccaccgggtccttagagactgaaagaacttgaaaagttaagggtacagctgagccctaagcaagaactctggtcaaggaaccaagcagaccaaagccaacaggaaggaggacacggttttggagaggagagaaaaagagacccctgtattgttactttgttcaacattttgtaaagttaccatcacagacagcatcaaccacttgaaccacttgtaaggcaccacctcagcagcagcaaggacacccacagtgccaagcaacctccccgtcaccccaaacctaagcactggtctcactaaacagtagctccacatcccccggccaccaccccaatccctccaagggttccctactctgaatcacacatacgtacacatgtgcgcatgcgcgagcacacacacacacagacacacacacagacggaatcatgcataccacatttctcttctgagtctacttcacatagcacagtggctttaaacttcatctgtgtgatagcacgtgtcgggtttcctctttgtaaaggctaatatgctgttgtatgtacataccttattttgctcctccatcattgggcacttagggtgtttctatcttttggcttttatgatcagtattgctagaggcatggatgtgcgaggaccagaactcctgatttgattcttgcagatatctatctagaggaagagccgttggatcatagggaaattttatgtttatcttttttaagaactgccggatggtttcctgtacatttttaatggaggaaatgtagtgaatcgagatacaacaaaattgcgtgagggagagagagggtaccacctcacccgaaatcaagctgaggacagaaaggagtctgtaaggtgatccaagcagggaatggagaggcaagggcggctaaattaggacctaggagatgatatgggctcttgagctatagagttccagaattcattttaaaatcacagaccagtagatacctgaagcttctatatagattacccagttcaactcactcgtagagatgagagaccagcggcccagggaattaatggagatgtggtggttataaaatactgtacttttaggcagcttacattaatgatcttggtgtgttgtgtttgtttgaaaaaaaataacttgttttacatttagagaaagtgtgtgtgtgtgtgtgtgtgtgtgtgtgtgtgtgtgttgtatctgtgcatgccatagtattattgtgaaggtcagagaataactttcagtggttagttctctgcttctactgtgtgggtcctggggattatcaggtttggcagcaatcacctttatccactgtgccatcttgccagtcccgatccaagagttcggaggggctacggagttgactgtgaaggaagcatgcaaagattgccactcaccctgccaacatctagactccgtatagactttactcccaagccccttgtgggtacactgccgggacctggcatgtagcttcactcccagaagctataagctgtgtagacagccagccagcacaggaaatgtaagtcagtttcctgcccctcagcaagagccccagtggaccctgcgagtttctgaaaggatagactagttatctgaaaatctgcgaagcttccaataggcagacttccccagccaagggcatctaacctgtgctcttgagtagacttcaagccctctggccacctgtgagaggtgaccaagaagagactctatccctccagctacagcccgaatcaggaagtgagtggacaggcgtggatggagaagagagggaaatcagaaggacagacagacagggaacaggaatgccacacaggagggaattctgcgtgggtctccaactcagtgctacaagagtatctgtgctcacctgttcccagacagccaggtctgtcccctagataaatggaggcccctttacacaaaagccagcccagctcccccaaagaaggctaccaagaggtcaggggcgtagtgggcaccaaaacattggcatgtatcatctctgcctccatgactcccacctagatagcactagatgagcaatcctgtaatgtttccttcaatatggactcacctctgtcctggggagaaggtagtatgccaccaagaagcaggcctatgggcacatgaacctgttgtgtcaactaagccctaggaaaccaagatcaagatacaggctcttgcacaactctgggtccccatcccttgctgcccaacacctagcccttagctttaaaccccttcgcagtggaccagaactgggttaggagttcagagcctttagaaacaggccagtgctttactagccactccctgaccctgattctagctggtctccagggaaaggacaagtgtccccattagacagggagccacatacagggagtgagtatcatttgaccctctgtgtgtcctctgagtccccagacaagccccaaataagagagagagagagagagcgatgcttcaaaccagtttgaaacatcgggacagacatgctcatggaaaacagtgcccttatgggatggccacccttgtcacccaaatatccactatcttgacaaggccctgtaggaaacaggtagatttcagagggtctgtgcacttacctgtgaagaaagggcctgcaagctaccgtaccacaataccatgttctcatcagctaagcgaggctagcaccataagaatatgtggcttagctggtatttggagatgaccctgctccagcataagttcctagacactcatagaatatgtatattgagtaattccaggttcgttggcaccttgcgcgcagaattcttacctctgtgggttctgctagaacatcagttaccttgttactctaggtgttcaaaaaacaaggtagccaggcatgtcctcgcagaatttaggaggctgagacagggaggttgatggacttgaggctagcctgggctaacgtagtgagaccttgcctcaaaacaaaaccagtctgattggaataagatctctaaagtgggcttagaagcagagtcctttgaagtcagccttctgggccatagacacttccctcccagtgacctatacttacaacctgtagaaatggccggagcagccagatgctggccaccttcccctgaccccagtgtgattccatcagaacctgcaatcccctaaccatccacttaactcttcaatcagctggaattgtgatgcttgtctcacagcctgctccctgtcccaaccactgcagggaaaaatccactcaacatggctgtgttctctggagacccacccctccagaaaggatttctgaaaattctctagcacgtcttcctgtctccctggaggagaggcccatgctttcatggccccggataagaaaacctgatacccacacaccagcccagggccacatgcacacagagatttggggatgatacagcctcaaagaaagctcttagaagggctaagtgcagaggctcggctggagtcctgagctctgtactgttaaactgcattgaggggagggaggaactggctattctctaccagctgcgccaagcacccagtgtagatgcaccagaggagaaacagatctacaagtgggcggggggggggagagccagggggagtgggggcttcctggaggaggtggccccaaagggagataggaggctacagtcaatgctaaggctggcataaggagtagtctgttggggatgggagagggccagtggggaggtgtgtccagccttggggggtgaggggggacgctgtccagccaggccatgaccctgctggcgccagcttcccacgagatttcaggccaaggctgcattttaatccaaaactcagacttctacctcaggagttgtgagcttcctgccagcttcaggcctgagcagtatcagggggtaggcagcgcagactgctcatctagaacccaggccagacttaggggaggggtccaaatcccagggtttcacctagcaggtggcattaggagcctagcatccccctgggtccggggggagcccctccccacccccagatcgtagtttctgagttccctagaggaatcctgaggagactggatgtctggagccagtcttgcctcgccgccactgccagcctgtgtacctgtgacaaaaatggaagcctgggtaagttctgtccatgagtagcaggctcttggatgaccgctcaccacccactagtgcctggaacttgtgaaagtcagttggaaggcaggggcagggacagcctcagacagtctagggatggaaggtaagataaacttccttggggtgcacttgacagactaacaggagcagggtttagggttcagcactgaaggaagcagcatgaactgcagaaggtgacattctgactgcagaaggtgacattctgagcaaggcaagtagaataatctcagccaatcggtttacccttccaggggcttcttcacccatataaaatgaggaggttagagatggtttcaaaggtcccttcccgcttattccaaagccttcacactacggggccggtggagacaaggcttcatccctaatgtccccagctgggcaggtctgcagccctggctggctctctgaccattcattttcccacatacccaccttggctgacctgctttggccacacttcctttggaggcagccctgagtaaacagaacagcctgcagggggcgccagcacgcaagacgggcctcacctgcctacagtaatctccccaaacccccaaccccccccccccccgcatttggcaccctgggtttaaaccatgtgaagatgactctggcacccaggctccatcacaaaattttacactgggggtggatgagatcctccagcgaggaccatggggacctctagggcaagctaacatctcatgtatttgtagggtttccggaagccaccggcaggtctgagaggtcccaggcagcctaggcagagggtgagacaagggtctggttccccagggacagaatctgtccagagatatcactgtgtctagggagcccagttgccctcggggaccagagcgctaatgagctccatccctggaggctgcatatttccagctcaggcaggtcggactgtctagcactccttgttcttcccagacagcgggaggaggtgtgaggacaggcctggctgtcagcagtcctcccacacggtgacaggagtggacaggaatctcagaggtgaagaacaggcatgagccttgggataaggcagactgcagccccccaggccttcccaccttgagaaggggcagttaaggaaaggggaggagggcttcttccttgccccaggtgccactctctccaggccttgggtggccctagccagcactgccctcctgcacacactacagaactgactggccttaggttcccacaggggcagctgtgagacccctgcatttcaatgccatccgtttatgccagggtctgtgttggatcactgtgtagtatgaaaccctctagtgggacacttcctgaagttattcacctgcccattttgttaggatcttcctaaagtcgaggactagaagacttggaatcccaaagttctagaaaaagtattgtgagcatcacagcaggcagacagtatggtgactcgtagcttttcttttaaagaactcaagggagccaagcaggaagatggatggagttactttgtagtcagctacaagtgtctgctatctacaggacctatcagccagcagtgtgggacaggagctcatactgatacttagctatgtggcccaagtgaaactgtgcctagagcgtccttcttctctgggccatagttggtagaggaggttcgaaccatggatgtgagacctatgtcctaagtgcctacattacagagacagaaaggaaaacccagaaaggccaggaaacaaagccatacagctagtagaaacagtagcaactggggcccgttcacgttcacatcctgcctttcttagaatgtactgccaactgagtacccacagccagaaacacgtccagaggtcagtgaggttcagtgaggtctggtgaggccaggtacgggcagaaggcaggtggccaagaaaggagacaagaggtagagacagagatgacagagtggttcagagcctacaaactaaacagtgatcgtgtgttctccctctgtcatcccgagacctaagaatatgaggaccgctcttggctgaagctcagtgtggggctgggggtgtgagccttcactccctgtctccctggaaagcgggcagggtccctctctatctgtgaacaggcagcaaactggcctggctgggcctcatgaaggcaagaagaagaaattgaccctttcctggcgagagagccaggcacaggaagggagcactggaagctgaagctctggatggcagggaagggtctgcaggtggctgggatgctcttgttgtgtctttgagcagcctgcgtagtcagagccacatcaagtctgcagaaggcccgagaaagcagataatttcccaggtgaccttgttccttgtgttacctgtttgtacacacatttaactactctctttccaagccccccaaggctaagccttaaactgtaagaagaactagagacagacagacagtgagaactgggtactcttaatgattggggaccatgggggtagtcgcacaagcagcccgagttgcccagacaaagagctgccttgtccgaagttttctcggcctctgtggccatttcttttatttttaaacaacccccattgctatgtgatttgtcatgaccttgtccatcgcagtggccgtggctgcatttcagaagaaaattaagtggctcaggactcgaaactggaaagagcagaaggggtctcactagagggtgaagaatattcaatgctacacattactcacatacacacacacacacacacacacacctccctagccttcacttgttagcatatatcgtctccctgcaaacttggctgcccaccacagacaccttggctcctctgcctgataaaggggaagttttcgtgccgtgcacttgagcgtacactgatacaggggtgtggggcttgctgccggctcaccatgcttcctccccctgtccagacagaagaggcagtgggagctacttgacaggaaagtcccagaggggcaaactggccaggggccactcagcctaacaaacatccattgagctcctgtgtatggctagggaaagagtactcgggtagggcccaaggaaggagggacgttcaaccgtcccttccatgatcctgtccgctctggcgtcccacccctccactgtctggcacggttttcctccacttagatctcagaaagctaagcagccgaaaaaatgctccctaggggaagtcactaaaggcaaacccaccctgtcacaaagctacaaagttcctcttctctttctcactgtcagtctccctggtgaccccgaagggctcccttgcaaaagtttgttctctggactttgtgtttttccctatctgcttgaccgtcctagtgcctgctggctcagaccccagcgccagcccctgtctgtccctgcaaacacaagtcagctgtgtgtgcagacaaagcctgcaactccgcgggggctgggccaggcagaagggacatttccagggaactctgggggcaatggctgggagggcagaggcgaccgtctgattagcagggaatcggcgtcacagtctaaggcagagagggtgcgggggctttggctggtccccaggggccagtggctgtgggtggtgaccaggggaggcagccaggctggaagaaatctgctgtttgagaagtggaggaaaccggctggagcggagagataacagcgtgttctctgtgtgtctgtgtgcgtctgcgtctgccggcgagggcgactggagccaggcggtctgaggccgtatctagtgagatttttgttctgggttgtgaaagtgacccatggagccagcagcagggttcagggcctgggagagaggacacgtgtccctggcctcctccccatgtcttatgctggtctcccctccctcccttggtcaaagcgtagaaggctggtgggggggtggggggtggggcgggcggcatccttaatacaaaggaaatggcacaaaggcctagctttcagcttgattgagccactcgttttgacatatgaacttgaatacttcccctaatatttctggctgtctcagtctccttgactatataatggggattatttatatctttccttgtgtagcccactggatagctggagagttcttatgaaataagggtgtgaaaatagtttataaactgtagagtgacacaaagactgagaatgatgggcacagctatgtcccctggtctgcttaaggaagacttgtcagagtacctcgcggtgggaggcagaggaggtagtgccagataaggaccctggggctcccaagaaggtgactccctcagtaaacaggcaggaagggatgtttccctgggtggggggctcatccctagcttgccctcacaaggagcagctggcctgggtcgagcatagacttctccagggacacaagaaagctgaacgaagacccttatccatggtagccagggggtctgccgttgccagggagataagttacaactgctcagaaatgtgggagagcccctcacttcgctctcttaagcctcaactgccaggtcaccttcttgatcccccatatccccgacctggaaaccagccagatgatctgggaactcagaaggagctggcaagagaggcaagactgtgagtctgggagtctgagagaagctgagctatttaaagcatgcagtgtggggcgagggggtgggggtggcgaatgccacctaccccagnnnnnnnnnnnnnnnnnnnnccttgcaatagcttgcccttccctggcccagatcctgtaccatagggcatccacaggaccatgggtcagatgtcccggctctgagaagctgcagctgatacagcataaaagggcagcccagcctggcctaggggcttgggtcctgtcttctgatcctccaggctgagctgatccagccacataggcgccttgatcccctgtgtcttataaataaggctgatacttatattcctgaagaggaatataagcctgcaaccccagatgtagagggccagtgggcagaagtggaactaggggctttgcctggttgctacttcccatgtctgggtctgacttcttagcacactccaggttaatgtaatatcatacacatacacacacatatatgtatgtatgtatatgtattcaatggccagatacctgtctggagttctaagcccttagttaatatttttttcttctacaagtggcctagtcagatacagagtaccactcaggccacacaagcaggaccagctgagagtaccttagcagagggctttccacaaatcagcatacgaaccaaaactgttcttagacgtgtacagaggctcacccaccgctgtttctgggaagggctgacccttgctctgagactacagatctcctactgccttggcactaaactgccttgcttctagggagtgatggatggacattttaaaaggcattcttaacaaagcagtgtttggaaactctcagtttatcagcccaagaaatcatggagcttggaattctggttcccttgccaacactcagctccccagggcaggatgcagccaggggtgctagtgtctgggcccacaagcccaaggctgtgtatccccagcccagtggtaatttcctcttcagagctagaatctccacccacacccaccccctgttctctcaccatgtggcttgaacatgagcatctgggagcccagagatgctctccaggctgctcctggtggcacatgacatgatgacctcattcataggtgacattacttctcactcactcccgtaacttcacatccatgtccccgtgttctattacccacgtggcccagatgtccccacataaagactcctccagtctcaccctgtctggctcacatactgatggacagccttatccacgccgaggtgtgccagcacctctgtatggtagatacatacagagcatcctcgtaacaaatggaaagatcctctcctgcccctgaagccttataatcctacggcgtggggatacagaaagacaaagccactgagcggtgttacagaggcacgtgtgaactactctgaggatctcatggagaaggccggttctccaagaaagggtgactggtagtcagcaccaatggagggcgcaaagaacctatgtgccggcccatcaactgagcacagtgcacttgggcagaggtggctgggctgaggggccagagccaggttgtgagaacggttcgtcctaccaaggaacagaaaccagacctttgggtccctgggccactggcaaagagtttgtaaggaggaaggtggtgtttcctgactgacattgacaggcctccctctgcggcaggatggagggctagatgagggctgctgcctcctctgcgcaggagacgtaccagagggaacctgcaagaaccaggataggcacaagcaacctccagttgaaaagcgccgggcacacgcctttaatcccagcacttgggaggcagaggcaggcagatttctgagttcgaggccagcctggtctacagtgtgagttccaggacagccagggatattcagagaaaccctatctcgaaaaaaacaaaacgaaaagtgacagtagaaccagcctcaacggctccatcaccaactgagaaagcaaggtgaaggaccgtgacccagaaagaacaggacaccaagccaaagtcacctagtctgggaaccaaggtcagggatccacccaggagtggcagactctgaggaactggttttaggtgagaagccacagaaggcagtgggtgagtgggtggggggtattggaggtttccagcttgggtgggacctcttccttgagcatgcacagacagcactctgagtggcaggacccttgggcagagtggtcacacacaccctgtgcacgtctcctgggctcaaggaggacacattccacctgagacttttctacaggttattcccaatgatgaccagtctgggatttgaggataaggatgctgagcctggacagttgggatggcttttatgaggtcctccagagtcccttacgcttgcccccgaaggcatcaggactgggtacacctgggcatcgcatcaccaccagagcaattgaaccagtaaggagtcagttaggacagagaaccaacaagggcaaaggtcagtcctggcagaagggcctcccctgtagcctgtagcctacctcccagagcaaaacagattcccaccatggggaatagagggctgttggcttccacttcagatgacctttggactgtctgagcccagcagggaacaatgcgaagggtctggaccgtagccacattcctgcataggtgcaggccataactctgctgctatagtgtcctctgtctgtaccagggcccttcacctgctttctcacatggtgatagagctgtcaggaattatagcggtgcctgacacattgtaaacactcaataaatacccagggttgggaatggggggggggggaattgcccgttgtcactgtgctgtccctcagttgctgagcagacaccagataaggcacgccccaggcagggacaggtgaacaatctaattagtcattggctggttttccttttgccagaattcctggtctacagaacccatgcctagaactctgaaggtaaaagaaagatcaggccagctgtctttcctccttggccacaccttagcatagctgtgagccttccttccctgctgtgactactgccacccctgctcccatcagactaactctagaaaaatccttctgcctggggcaggggttagggattagagtaaatgacctctgagtgtctccggcccagtgcagcagtaaagtcctcttcttttactcagccactcagcctgggccccacaggggactacagccatatggttcacctagcagactggatgagggtcctggggctgactctttgtttggggcctccacaccattgaggcaggggcggggccgtgtcctgacaacagccgtacctttcactggccctcttagagcagctgtgagggacagagacaagagacagatgaccaaggtctgctccgtcctcagtatttgtaaaacatggcagaaaggcccatccatgaaccactgtggcccttgtcagttctctgttctgtttgaaaacggaaaactaggggagggtaggagaaaagaggaggaagaggaagggaggaagaaaacggaggggggaaggggaggggtcccacatctcttagaaggcttttcctcttgcttttctgcttcagcgggcgcattcacttgcaggctgtacagccgtcctgcctcagctgctccttggcccttaaatactgctacccccaaaccaggaatggcaagccctagccctggccctgacctccaggtctccctccttcatcctggaagggaggtgtgtgtgactgtggtctgatcacatgttccctggtaacatggaagactcggaaaagctgacggtcatgggttcgcggtgccaagggatgccagcttggcagtcctgagtatacagactctctgtgtcagttaagaaagaacggagctcagtgctcctgcttcaggtttctgagtgaaaactcccacaggaaacattcgaggaggctcaccctccagccactggaggagagggggcagcttttagttgtgtccttttcccagggcagagatgggaaatagaaaaagaatacaacataatttgagttaagatgctgtttggggactgggacagctatctttttgggcagagccccattctatggaccttgcctctcaagcagagttgctggggcctgaacaaggggaacagccagtgtttcaggccagggttcaaggagttcgggttctcctctgggcctcgctcctgagagtagagatgttaggcaccatcagtgagtcatgagacagtgctcctctgtctccccatacagcccagggaccctaccaggagcatttgacaccccctccctctggctacacagctgccctgtagtagctgcattgccaaggagatctccgaagcaaagaaggtttgagaaactcactaaacagccagaaagtgaagggtagccttctttgtagataagactcatgtatatgggaaggatggaggagtgtgtgtgtgtgtgtgtgtgtgtgtgtgtatgtcttcagtaggggcaaaacacaagacccatggctatgactgagacacagtggccatactcagaaatggaagcaaaaagaaacccttggacttttgtgtacagtgggagtgaacttggcaccacccccaccttggaggtgtggccactggaggactctgttgtggcacagttgtgacatggagttggttgatagtggccaagactgttccaggcttaccttccaacaagaaatgcttaaggcccggggtccctgggcagatgcagcagtgtcatgtttaccctggcactacctgacacctgtcggatgtgtgcagcttctttgaacacagtccttctagaccacagtatccttccatagcaggaagggctggaccagagaagcctttagtcattatctttggctttggggatatgacggctgacttatagtttcctacaaatatggtgaacaatggtagacctaggtgcaaattcctgatccgtagtatactacagatgtggtacactaccatgtggccttggctaagtttcgtattctttccaagcctcagtttccttaataataagggggtggggctttaatgagaacactctatggactaactataggaattaaattatataatgtatgtaaagggtctagcacaacaccggcaccctctgtaagccctcagagattcaactggaagccggttgaggtaactgtgataagaatttgcattttagtttgtcatcacatacacaatcaagtataaatgagggacgtaccacatccttaaaacagaaacttatgatatttagatgttagttccttttatctgtacgtagcccaagctggcttcctgctcagttatcctgccttagagtcccaagtggtaagattacaaatgagcatccttagtacagcccttccgcagtggtactataattaagcatctctagatccaacagtcccaacctaaggaccaacagagtttctggcaaaaattggccaaatttcttgatgggaggtaagcctgggacagtcttggccactatcaaccaactccatgtcacaactgtgccatcttctctccagtggcctgcacctccaagtggggtatcaagttcatcctcactgtgcaaaagagtccaagggtttctttacttctctgagtatggtcactgtgtctcagtcatagccatgggtcttctgttttgtccctactgaagacacacatacacacactctaaactgtatatggaaactcagaggatctgaaacaatatccaaaagtcttggggggaaaaggaagtttattaagtataactaagaacagtttggggtgtcaggaagcttacggctccgtagggaagagtagatgttttagtaaacacctctctcagttccccaggagtgtaggtcaagaatgaagacgtcagagcctgacccctgaccctgagtggcagttctgttcatcatgatcatcacctctcagtatcccaggtgcctctaatgtacaatggcataattatagtaccactgccgaagggctgtactaaggacttagccagttaatgcactggtggggtacactctttgaatagaaccccaagctcggtggtattgcttggactgaccagagctcctcatgtaagaatgagtctcatataaacgctatgatatttgagagagaccacacggttagaacactcaataatgctcagaggggttcagaggccagggagctttgaacttgggttggcaggggatgtgcacaaaaggggtgggggtggagctgagtacaatttgcatgcaaatctgcccagatgtcctggcactcaaagctgggctgagaatgggaagagaaggtcagagctcctgcccttcgacccctgtaccatggagaaagacatctggaaacgtgaacacgtactgaaaggctgttgctgagatgctaaggcatcctagatccaacctccttgcctgagacccaggctcaaagttgctggtgcagtgtcactaggcttaaggttaaacacagagatggtctcctgcagacctggagtgaacaaagataacaaggattctgcaaggggttgcctgggccctgaggagacttgctggaaagacacattccaggggtcgtttgactaaggggacaccaccagcgttagtcaccgaagggcagcctgccaggtcctccaggacgccaagcagaaccctctggctcaggcccagcttagcagttccctccccgccccctggatacacgtagctcaccaggcctggggatatttccagaaagtctaagaaagtcctgggtctggggaggctgagagagtgcctgcccagggctgagggccaggtccctcacagagaaacagacgtgcggaggggaggggatgtgaggggagggaaggcgaggggaggggcagaggacgtgaccggcagctttcattccgggagaccggggatttcagaggaatgcagccaactcggcctctcaagttcctacttcagaccccgcccggctggagcctagggcgcctgccggggccaccttagaaatcagagggatgtgtcacaggcagtgctgtggaggggaacacgtcctgcctatagttctgtgagcagactcacccccacccgacccagtccggttcctgaaagcgccttctggttctgcagagccaggggagccgcactgactcagcttccttctctcagtccccaaacctggccacctacagtctctaccagaaacatctcagcgcctagaaacacccagtgcttctaggaatatcacatctctatcatcaaggtcatgagtacacctgggggaaaaagagaaatagactgcaccgcccacccctacactatggctccgcccaccccaaactatggctccgcccaccccaaactatggcttcagtctagagggagggacactggctgaaaaggctccacgggcccaggtagctcacaaggctcctcctgcatggctggctggccatgttgtgagagtcatttgctagacagttgaggaacaagattgaggaggggaagagatccgtccggatgtcctgccacagacatgtttgtggatttacccccattttctccttccttccatccccgtttctatcaagctctggacagaccggcaggctccaaggctgaactagcagagacccagaaaaaaaagaggaggggctgttttcaggaagctggctgtctttcatcatttctctgccccgacccctaccccaactggttgaacgctactcctctgcccacttagttctgctcgccctggggttcctcctcttagtgacagtgaatagtttacaggaatgtacctgtggcttgcccagagagcccgaggccccgagttttaatatgtgttctccctcccagagccagcccagcttagcctgcctgcacccctctattttctgattcctaagattccgtacaaatagcccttcctgttcacccaggctcctgatgtctgtctgctccctcactgggcatgtagctctttgctgcctgttgtttctggcctcctttcaagggtccgttcctatctctctaactacatttcacgcaacttgactcttggggcggtctatgaacacctacaaacagcctactgtgtgccaagcctggactacaggaggggagcccgtagtaggcagaatagaccaaacaacatgtcgtgaacgaagcaaggaacacagaggccagggatcagtaaccaagcaggttacttctttcttattctgcagttaagtgtgcagggaattcgtaactcttgagagacccaacccagagtgcaaaatcccagaggcaggatatgcctgccccgtggagcaaggccagcagccagcactggaaggacttaggtcatcagggtgagggatctgcaggctgccacgaggctctgtgtcagtactagaggaatggaatgtgtagagattgtgatcgagactgtgtctgactcagggtcaaccctagctgcttgggttgaagtggtctgagttgggtgtgggggggaaccagcttgcaggcttcaggagagggctccaaggaaagggtggcaggggagctcaaaggaggggctcaagggtcaggtgcaaatatctaagacattctggtgttcggaggtgtaatctggcagggatagacccaggagacatcaggtggcctttaaagccaaatgactagctgtggtccccagggacagtgaccagtgagaagagcactcatgtcacacaggagctgcctctggaccctgaagttaggaatgagtgggtgacaggcctgtcgcttgcaccctgcatggcagagatgagaggcagggggctctagcagctcgtcctagaaccctcttccacgctggcccagcagagggcacatgggggccagttcacaccacttccgaactgaggcttctccaacggagggagaaacaggggcaaggccacagtccctgttaccccaaacctcttgacgtttcataggaaaacggtgtcgttttatctgtccatccctctgcgaggcttaaatttcatcttccagaaaagtgacccggagcccggagcacaggacaggcacctctgctatctttgccccctgtggctttatataactcaggccttttcgcacagccattcacaaccctggcttctgtcctgctgtgccaataagattaagtattcagctcccactatattttctcctctgtactggtgacaagatgtcccctgcctccacgacagtgtctcgggtaaacagaacacagttggccctctgcatccttgaattctacctttgcagttcaaccaactgcaagcagaaagaaactttttttttttttttaggattctagaacgttccaaaacacaaaacttaaaatttccacatactgagtgccatgttgtagcaaagtgatctgtaggcatttaggtttgacattactagttatctagagatggtttaaagtatacacaggaggatgtaaccgttagtcatgaacacagtgccgttttatataaaggatttggatatcttaaggtttggacaactataggaatactgaaaaataaaggtgcccaggtaggagataatatgttgggtggtcatgggctccagtggactttttaataaatagccaagttgaagtttaccttcattgactctccccaccccccaaacacacacacacacacaaatggcttccagatacttctttgaggtcactgcacaaatacaaaaggaagatggagttgctcaaaaatggcccaaattcctggtttaattccacctattcaccgttccgtgtgtttctagagagatggttaagcatatggaagatgtctgacgtactgtactacttagttcagcttacagacaggatcccgagaggaactcccagccgcccaagagcacttagtaccggcagtgagagatcaacacttgagtacaattggggtcccttctactcctggtaccgtcttccctgctctgcaacagattttgtgccatatcactgcctctctagaagagaggggaaacccagactcctttgggatcctttggacctaccgattaatggcccaaagaatgtcttccaggccccaagaggataccgtggggtcttgctacctcatttatcccatttccactcccttagcagatctgttccctctaagctaggtacagagctgagacagggtgagtcctgagtgaggctgagtcaccccagacaaggacagtgtaggtctagcacagtcaagatggaaggacaaaagctgagctaagagacacaaatgaaaagttaggaccctcgcccaagcctgcatctgacaagccaggcctccggtggcctccccagggtagaggagggactgtgaggccaggagaagatgtgctttgacaggcggctctggataagcaggctgatgggcctctctgtagtcaacctcttgacatggtgcatatagggacgttagggatgcggagggaagtttagggatgctcgtcccagaatagatttaaaactagggcagcctcacagagcacctaagctgattgaaagcaggtaggattgaaacagatgctttctggagatgcctgtcagacccaagtatgtcaaaacgctgtaggttttccccgattgttcagcagacctcggggcacagcttaggacgttcattccccctgggctccttgtacatactgcattagaaccagcatctgacagaggagcaccagacagacccaccagtgtccacagaaggagagacccaaggcaggtggggcagggtgtagatgagtggacagatgatgcttgtagcactacctgtcctccagatgagctggctctggttctgggagggcattggtaaccacgtggaaatcctaagtggttagtcttcccttcactccctgtatcagtggatgttactgtcactttaagagtgagccatggtctggaagcccattctggcccactattttggtcccccgtggcaaagttagtttttgcagaagagaccatgacatgcttcttcatgggaagttcaccgggacacatgannnnnnnnnnnnnnnnnnnnnnnnnnnnnnnnnnnnnnnnnnnnnnnnnnnnnnnnnnnnnnnnnnnnnnnnnnnnnnnnnnnnnnnnnnnnnnnnnnnnnnnnnnnnnnnnnnnnnnnnnnnnnnnnnnnnnnnnnnnnnnnnnnnnnnnnnnnnnnnnnnnnnnnnnnnnnnnnatccacaccccccccccaacatgagctcgagccccatcttggaaaggccaagccatctagtgtccgtagccctccatcaggtatcatggtacctatggtataagtcattggtactgtagattgtcaggaaaacaaccatgacagactagtgtcaaaaaaggcaaaatatttcatatctaaaatatgattttagatcaacaggagtctgtggaagaggaagttggctgagaccattacagcagaaagctaatctgcatgaacagaaggcagaggccacctgactatctgatggcacctaatatctatgcccagacactccaatgtgtgtacctcatagccacccaagccatccctggggaaaactcagagcagacgccaattcacactctcagtttctggaataggcgatagtactccctgaaagccccaaggttgtggatatataaggggtcttgggagctagtggttttatcttagtgagaagtgtggcttagggtcctgcatgacagtttgcatcagatgtgctcagcctgaggaaagttactgtgtccttatcaaagtgtccccagagccaccactatttcctataatggtttaccctaggggagtcaaaaacctctggattcttgcctgcagagcctcctgtctatagagtcctgcttctctcacaaaaaggcaagtttcaaatcggctgagatgggccagcatgacttgttgtggatatgtgtcctgtagtttgactggtaacttcatggagagacagcctttctagcagaggagggctgacagcatggcctcgggtgctatggcattcccaggtgagagatgcccaagagggtctccattgaagcatcaccccttggagtgaggcctgcccttgtggatctgaagctgccctctctccctctaggataggaattggatgcttagagttcatgtgagaagtggtggggtacatcttatgaactgctgggcagagggacctcagcaaggccaggtgacctgccagagcttacctagctctctgcactgtccttgggtacttactaaggacgtcagccctgtgttgggcagggccaacttcacgtggaaggagtaagcagacctctgcccacggttacagcatggcatgacgtggaggaacagcacttcctctgtgggcagcggagccagcacccctaggggcatgctgggccaggaggtgccagacactacccatccctccagcttcctgtccccttcttctgcaggcctaggagggagttgcggttatttttatctgaggacactggagtgggaggtatttgtcagcatcatctggtaaaggcaattgaattgtctgtggtgctaagcatgcgaggctgttcacatttaaaaatacagttggacccgtgacagctgatgtgttcatagtgctgacatcacaacctaaacccagacggtcggatcctgagcccagcctttcagaaagccatggttctgtgtctgccatctatggaagaggaaaaaatggtcacagtctctaggttgccggtagggcaggtaatctccaccctatcctggggtgttggatctgacagtgcagtcactggacatgccagtacatgctacatgcagcccccatgtctctaaggacagtttcagcgtgtcgctgcggaggaccttacattaaagtttccttattgggtgtgatacctaacattttcccagtgtttctgagtcttaccgtgttccaagaggcggcctcaccagggctgtgggagtgtgtgtccttgactgttttctgttgctataacaaaaatgaagcaaactcatttatggacatctttcttcagctcacggttctgaagccggaaggcgaagaggagggaatggcctttactgaggggcttcgtgctaccttgttagatgacagaagacttcagggcaagtgagctcatgaggaaagaaagtgtgaggtagactccctgtaacaggcagttctcacatggcctcaccgcctgtcttattctattgccgtgcagagacaccatgacagtggcaactcttataaaggaaagcatttagttagggctggcttaccatttctgaggttcagaccattatcatcatggcgggaagcctggtggcatgcaggcagccatggagctgtggaagtagcagagagtgctacatctggatcggcaagcagcaggaagagacagagactcactggccaagcttgaatgtctaagaccttaaatcctaccccctgtgacacacttcctcctacaagatcacatctagggctggtgagatggctcagtgggtaagagcaccctactgttctcccgaaggtcccggagttcaaatcccagcaaccacatggtggctcacaaccatctgtaacaagatctgactccctcttctggacagctacagtgtacttacatataataaataaataaatctttaaaaaaaaannnnnnnnnnnnnnnnnnnnnnnnnnnnnnnnnnnnnnnnnnnnnnnnnnnnnnnnnnnnnnnnnnnnnnnnnnnnnnnnnnnnnnnnnnnnnnnnnnnnnnnnnnnnnnnnnnnnnnnnnnnnnnnnnnnnnnnnnnnnnnnnnnnnnnnnnnnnnnnnnnnnnnnnnnnnnnnnnnnnnnnnnnnnnnnnnnnnnnnnnnnnnnnnnnnnnnnnnnnnnnnnnnnnnnnnnnnnnnnnnnnnnnnnnnnnnnnnnnnnnnnnnnnnnnnnnnnnnnnnnnnnnnnnnnnnnnnnnnnnnnnnnnnnnnnnnnnnnnnnnnnnnnnnnnnnnnnnnnnnnnnnnnnnnnnnnnnnnnnnnnnnnnnnnnnnnnnnnnnnnnnnnnnnnnnnnnnnnnnnnnnnnnnnnnnnnnnnnnnnnnnnnnnnnnnnnnnnnnnnnnnnnnnnnnnnnnnnnnnnnnnnnnnnnnnnnnnnnnnnnnnnnnnnnnnnnnnnnnnnnnnnnnnnnnnnnnnnnnnnnnnnnnnnnnnnnnnnnnnnnnnnnnnnnnnnnnnnnnnnnnnnnnnnnnnnnnnnnnnnnnnnnnnnnnnnnnnnnnnnnnnnnnnnnnnnnnnnnnnnnnnnnnnnnnnnnnnnnnnnnnnnnnnnnnnnnnnnnnnnnnnnnnnnnnnnnnnnnnnnnnnnnnnnnnnnnnnnnnnnnnnnnnnnnnnnnnnnnnnnnnnnnnnnnnnnnnnnnnnnnnnnnnnnnnnnnnnnnnnnnnnnnnnnnnnnnnnnnnnnnnnnnnnnnnnnnnnnnnnnnnnnnnnnnnnnnnnnnnnnnnnnnnnnnnnnnnnnnnnnnnnnnnnnnnnnnnnnnnnnnnnnnnnnnnnnnnnnnnnnnnnnnnnnnnnnnnnnnnnnnnnnnnnnnnnnnnnnnnnnnnnnnnnnnnnnnnnnnnnnnnnnnnnnnnnnnnnnnnnnnnnnnnnnnnnnnnnnnnnnnnnnnnnnnnnnnnnnnnnnnnnnnnnnnnnnnnnnnnnnnnnnnnnnnnnnnnnnnnnnnnnnnnnnnnnnnnnnnnnnnnnnnnnnnnnnnnnnnnnnnnnnnnnnnnnnnnnnnnnnnnnnnnnnnnnnnnnnnnnnnnnnnnnnnnnnnnnnnnnnnnnnnnnnnnnnnnnnnnnnnnnnnnnnnnnnnnnnnnnnnnnnnnnnnnnnnnnnnnnnnnnnnnnnnnnnnnnnnnnnnnnnnnnnnnnnnnnnnnnnnnnnnnnnnnnnnnnnnnnnnnnnnnnnnnnnnnnnnnnnnnnnnnnnnnnnnnnnnnnnnnnnnnnnnnnnnnnnnnnnnnnnnnnnnnnnnnnnnnnnnnnnnnnnnnnnnnnnnnnnnnnnnnnnnnnnnnnnnnnnnnnnnnnnnnnnnnnnnnnnnnnnnnnnnnnnnnnnnnnnnnnnnnnnnnnnnnnnnnnnnnnnnnnnnnnnnnnnnnnnnnnnnnnnnnnnnnnnnnnnnnnnnnnnnnnnnnnnnnnnnnnnnnnnnnnnnnnnnnnnnnnnnnnnnnnnnnnnnnnnnnnnnnnnnnnnnnnnnnnnnnnnnnnnnnnnnnnnnnnnnnnnnnnnnnnnnnnnnnnnnnnnnnnnnnnnnnnnnnnnnnnnnnnnnnnnnnnnnnnnnnnnnnnnnnnnnnnnnnnnnnnnnnnnnnnnnnnnnnnnnnnnnnnnnnnnnnnnnnnnnnnnnnnnnnnnnnnnnnnnnnnnnnnnnnnnnnnnnnnnnnnnnnnnnnnnnnnnnnnnnnnnnnnnnnnnnnnnnnnnnnnnnnnnnnnnnnnnnnnnnnnnnnnnnnnnnnnnnnnnnnnnnnnnnnnnnnnnnnnnnnnnnnnnnnnnnnnnnnnnnnnnnnnnnnnnnnnnnnnnnnnnnnnnnnnnnnnnnnnnnnnnnnnnnnnnnnnnnnnnnnnnnnnnnnnnnnnnnnnnnnnnnnnnnnnnnnnnnnnnnnnnnnnnnnnnnnnnnnnnnnnnnnnnnnnnnnnnnnnnnnnnnnnnnnnnnnnnnnnnnnnnnnnnnnnnnnnnnnnnnnnnnnnnnnnnnnnnnnnnnnnnnnnnnnnnnnnnnnnnnnnnnnnnnnnnnnnnnnnnnnnnnnnnnnnnnnnnnnnnnnnnnnnnnnnnnnnnnnnnnnnnnnnnnnnnnnnnnnnnnnnnnnnnnnnnnnnnnnnnnnnnnnnnnnnnnnnnnnnnnnnnnnnnnnnnnnnnnnnnnnnnnnnnnnnnnnnnnnnnnnnnnnnnnnnnnnnnnnnnnnnnnnnnnnnnnnnnnnnnnnnnnnnnnnnnnnnnnnnnnnnnnnnnnnnnnnnnnnnnnnnnnnnnnnnnnnnnnnnnnnnnnnnnnnnnnnnnnnnnnnnnnnnnnnnnnnnnnnnnnnnnnnnnnnnnnnnnnnnnnnnnnnnnnnnnnnnnnnnnnnnnnnnnnnnnnnnnnnnnnnnnnnnnnnnnnnnnnnnnnnnnnnnnnnnnnnnnnnnnnnnnnnnnnnnnnnnnnnnnnnnnnnnnnnnnnnnnnnnnnnnnnnnnnnnnnnnnnnnnnnnnnnnnnnnnnnnnnnnnnnnnnnnnnnnnnnnnnnnnnnnnnnnnnnnnnnnnnnnnnnnnnnnnnnnnnnnnnnnnnnnnnnnnnnnnnnnnnnnnnnnnnnnnnnnnnnnnnnnnnnnnnnnnnnnnnnnnnnnnnnnnnnnnnnnnnnnnnnnnnnnnnnnnnnnnnnnnnnnnnnnnnnnnnnnnnnnnnnnnnnnnnnnnnnnnnnnnnnnnnnnnnnnnnnnnnnnnnnnnnnnnnnnnnnnnnnnnnnnnnnnnnnnnnnnnnnnnnnnnnnnnnnnnnnnnnnnnnnnnnnnnnnnnnnnnnnnnnnnnnnnnnnnnnnnnnnnnnnnnnnnnnnnnnnnnnnnnnnnnnnnnnnnnnnnnnnnnnnnnnnnnnnnnnnnnnnnnnnnnnnnnnnnnnnnnnnnnnnnnnnnnnnnnnnnnnnnnnnnnnnnnnnnnnnnnnnnnnnnnnnnnnnnnnnnnnnnnnnnnnnnnnnnnnnnnnnnnnnnnnnnnnnnnnnnnnnnnnnnnnnnnnnnnnnnnnnnnnnnnnnnnnnnnnnnnnnnnnnnnnnnnnnnnnnnnnnnnnnnnnnnnnnnnnnnnnnnnnnnnnnnnnnnnnnnnnnnnnnnnnnnnnnnnnnnnnnnnnnnnnnnnnnnnnnnnnnnnnnnnnnnnnnnnnnnnnnnnnnnnnnnnnnnnnnnnnnnnnnnnnnnnnnnnnnnnnnnnnnnnnnnnnnnnnnnnnnnnnnnnnnnnnnnnnnnnnnnnnnnnnnnnnnnnnnnnnnnnnnnnnnnnnnnnnnnnnnnnnnnnnnnnnnnnnnnnnnnnnnnnnnnnnnnnnnnnnnnnnnnnnnnnnnnnnnnnnnnnnnnnnnnnnnnnnnnnnnnnnnnnnnnnnnnnnnnnnnnnnnnnnnnnnnnnnnnnnnnnnnnnnnnnnnnnnnnnnnnnnnnnnnnnnnnnnnnnnnnnnnnnnnnnnnnnnnnnnnnnnnnnnnnnnnnnnnnnnnnnnnnnnnnnnnnnnnnnnnnnnnnnnnnnnnnnnnnnnnnnnnnnnnnnnnnnnnnnnnnnnnnnnnnnnnnnnnnnnnnnnnnnnnnnnnnnnnnnnnnnnnnnnnnnnnnnnnnnnnnnnnnnnnnnnnnnnnnnnnnnnnnnnnnnnnnnnnnnnnnnnnnnnnnnnnnnnnnnnnnnnnnnnnnnnnnnnnnnnnnnnnnnnnnnnnnnnnnnnnnnnnnnnnnnnnnnnnnnnnnnnnnnnnnnnnnnnnnnnnnnnnnnnnnnnnnnnnnnnnnnnnnnnnnnnnnnnnnnnnnnnnnnnnnnnnnnnnnnnnnnnnnnnnnnnnnnnnnnnnnnnnnnnnnnnnnnnnnnnnnnnnnnnnnnnnnnnnnnnnnnnnnnnnnnnnnnnnnnnnnnnnnnnnnnnnnnnnnnnnnnnnnnnnnnnnnnnnnnnnnnnnnnnnnnnnnnnnnnnnnnnnnnnnnnnnnnnnnnnnnnnnnnnnnnnnnnnnnnnnnnnnnnnnnnnnnnnnnnnnnnnnnnnnnnnnnnnnnnnnnnnnnnnnnnnnnnnnnnnnnnnnnnnnnnnnnnnnnnnnnnnnnnnnnnnnnnnnnnnnnnnnnnnnnnnnnnnnnnnnnnnnnnnnnnnnnnnnnnnnnnnnnnnnnnnnnnnnnnnnnnnnnnnnnnnnnnnnnnnnnnnnnnnnnnnnnnnnnnnnnnnnnnnnnnnnnnnnnnnnnnnnnnnnnnnnnnnnnnnnnnnnnnnnnnnnnnnnnnnnnnnnnnnnnnnnnnnnnnnnnnnnnnnnnnnnnnnnnnnnnnnnnnnnnnnnnnnnnnnnnnnnnnnnnnnnnnnnnnnnnnnnnnnnnnnnnnnnnnnnnnnnnnnnnnnnnnnnnnnnnnnnnnnnnnnnnnnnnnnnnnnnnnnnnnnnnnnnnnnnnnnnnnnnnnnnnnnnnnnnnnnnnnnnnnnnnnnnnnnnnnnnnnnnnnnnnnnnnnnnnnnnnnnnnnnnnnnnnnnnnnnnnnnnnnnnnnnnnnnnnnnnnnnnnnnnnnnnnnnnnnnnnnnnnnnnnnnnnnnnnnnnnnnnnnnnnnnnnnnnnnnnnnnnnnnnnnnnnnnnnnnnnnnnnnnnnnnnnnnnnnnnnnnnnnnnnnnnnnnnnnnnnnnnnnnnnnnnnnnnnnnnnnnnnnnnnnnnnnnnnnnnnnnnnnnnnnnnnnnnnnnnnnnnnnnnnnnnnnnnnnnnnnnnnnnnnnnnnnnnnnnnnnnnnnnnnnnnnnnnnnnnnnnnnnnnnnnnnnnnnnnnnnnnnnnnnnnnnnnnnnnnnnnnnnnnnnnnnnnnnnnnnnnnnnnnnnnnnnnnnnnnnnnnnnnnnnnnnnnnnnnnnnnnnnnnnnnnnnnnnnnnnnnnnnnnnnnnnnnnnnnnnnnnnnnnnnnnnnnnnnnnnnnnnnnnnnnnnnnnnnnnnnnnnnnnnnnnnnnnnnnnnnnnnnnnnnnnnnnnnnnnnnnnnnnnnnnnnnnnnnnnnnnnnnnnnnnnnnnnnnnnnnnnnnnnnnnnnnnnnnnnnnnnnnnnnnnnnnnnnnnnnnnnnnnnnnnnnnnnnnnnnnnnnnnnnnnnnnnnnnnnnnnnnnnnnnnnnnnnnnnnnnnnnnnnnnnnnnnnnnnnnnnnnnnnnnnnnnnnnnnnnnnnnnnnnnnnnnnnnnnnnnnnnnnnnnnnnnnnnnnnnnnnnnnnnnnnnnnnnnnnnnnnnnnnnnnnnnnnnnnnnnnnnnnnnnnnnnnnnnnnnnnnnnnnnnnnnnnnnnnnnnnnnnnnnnnnnnnnnnnnnnnnnnnnnnnnnnnnnnnnnnnnnnnnnnnnnnnnnnnnnnnnnnnnnnnnnnnnnnnnnnnnnnnnnnnnnnnnnnnnnnnnnnnnnnnnnnnnnnnnnnnnnnnnnnnnnnnnnnnnnnnnnnnnnnnnnnnnnnnnnnnnnnnnnnnnnnnnnnnnnnnnnnncacacacacgctcacacacacacgcacacacacgcacacatacacactgcaacacacttgctccacacacacgaccacacacacacacacacacacacacacacacacacgcttgtgcacacacacgcacactggccatatccccatccctcagtgaatttggcaagaaggctgactctcacctatttgtcctggtccctggtaaacacctgactctaggctgttggccactctcctagcaaaatgagagtccaacagggaggaaccctgattcaagaaacagcaacccagacctttcttcaagggaacctggaaagaagaacaggataggggtagcctgccaccatgttcatgagaaggcctgttttaaagtttacctcaaggagtagaaagcagagccaggcttctgttcctcctgccaacctcagacagtggtcagacccaggtatctgaccattcccaccccagtgagatgccaagtggtagagccaggtaaacatggagagggcaccataagaatgcacacagtaggacagtcatagccactttggactgacagtgagacaggtgccccctgctctgtgggcctctatgccctgggctggttacctgtagctatgtcttccctgtagcggaggcaggtgccactgtatctgagtatatatcatcatcatattcagacagctcagctctctcctctggttccgctgaaaggaaaacttccagccctgtggagggcttctcaaggccatagccacagcaggtgctggctccccttgcctgagaatgaggcttcacgcctgcgtaagtgtgagacagaattcccactgaatcagcccggcttctcggcttctcccgcaccccagcaccactcccccgccctgctgccatcagcagggcccagcctacctgacctgatttcaccaactgaaatagtctgggtgctcacagcccgggacagttggaaatgtctctagaatgatctagcatcatctggaaggggctgatggcatttcccagccacggtgtggggtgtgggtccttaccctggaggcaagccctaggaagaaagcattcacaaccttagtaccaagagccagcggtctcagagaacgtctccagtcgttaaaggggcatctgggggcatattttgtgtgtgtgtgtgttgattagaacagactcaagagcattcttatggaattcttttttgtttgttaggtgacatcgaaccacagttacaacagcacatagaagtcttgatacgttgaccaccaggagagtttgaggcatatgtgacagccacctgatggtgtctgtgtttgcagtggctttactgtctctgtcctttatccaggggtctacagctaccctgtagacctacacagaaaggctgtgagacctagggctggccaatcaatgccttcataagtgcatgatcggtctgaaggagggccatgtgtaaagcagagccagtcacaaccccactccgacttttggggattggctagtaggagagaggggctccctgtcttcttctaggcccacatcattataaaagacagtagggcctgctagaagccacctttgctgtgttggtcagaggcccttgttatggtagagagtatacagtaggcgtatacactaggcagaagctagagagtatacagtaggcgtatacactaggcagaagctagagagtatacagtaggcgtatacactaggcagaagcttctttggcagagcagttctgacatcgtgtctttgccctgtgtttcccgtgactacgtctctggaccctgctcaaggaagcccactgaagccctgtgtgcccgttttcatttgcaaagattctgtcactgacaagtgaaacccataagtgtcatggttcagagcagagtgaagcattgaagtcaccaggagctgttattgggtgatgggtgtgggtcaaatgtaatggggaaagagccaggttttatgataagaaatgatatacagaaacccagccagtggctcagggctaacagatataagaaatccaaggcaagcaaccagtctttggcagaggccacaatcctttgttcacaccagtcttctgggataccttctcctacagacacaataatgaacaaagtaggtaactgccagagtccgagctctattctgtaacatcctggccagatgtggtatccatgtccccaaagactaaaccaacgccaccatccagatctaggaggtggccaaggtgaccagcttagagtccagcagttgcgtcccttgactggaaccttccagaaagaggaaatgtcaaagtctagggaaggctttggtagacaggatggctcgggagacttctcccagaaagccctgccacttattaaatgccttctgggtgccagatacatgacacatggcactcttgataccaaagagaacaggctgacttgatcagactaatgctaagccctggggagccctactccatgcttccttgagtagatatgagaaagcagaggtctgtctgagatccaagctaggtccccttttcccctcctgacaccatagcctagggaaggcagccagtgccacccaactctctgttccaactctgctccctcatactgagtaatagtgattcttctctgaggacaggagcctattatgtcaaaggggtctattgttacatgaatcagttctttttgtcaccagtcacagaaaccaacttcaagtagcttaacatccccaagtcttgaggattctaaagcattaagtcccaagagaaatgggaactagaacagtgggctcttctggggccagaaatgacctgatttgtgctagcatccctggtctctgagaagacctaagcttggagatcccctcccctctttactgttgatgcctctggcataaggaaagacttccatggggcttttgagcaggagcctccttccctgggcttccccaatgataatgacttggttgggacaacagctttctcctgggtgcaggtggcagggcctgggctgagatgtagagccagagcaatgaggagacacttgagtttctgtgggcaagtgaggaatacagacttgacaagcagtccaaaggagaaattccaggtgggaggaagtgaccagaatcacaggtgactacagacacacacgtacacgtatacacacacacacgtacacacacatacacacacatgcacacacacacatatgcacacacacatacatacattcacatacacacacgtacacacacacgtatacacacatgcacacacatgcacacacacacacacacacccatatgcacacacacacatacatacattcacatacacacacgtacacacacatgtacacacacacacgtacacacacgtacacacacatgcacacacatatacacatgtacacacgcacatacacacacatgcatgcatgcatgcacacacactcacgcacatacacacacgtacacacacatacacacatatacatacatgtacacacacgtacacacatacatacacacacgtacacatatgcacgcacacacatacgcacactcacacacatacacacacagcatagcacagtggtgtgaccttccatgcagcaacatagagaaaggaaacagtctaagactgggcagaggaacagcaaatgtcgacagtatagcccaccaaagtgaaatgtaccgtgagtcatacctagcacacgctggcatggagagatgtaggtaagaagtgagagagggaaactagcagacacacaaagcaaaggaaaggtgagctgggcaaacatcctcctttctactctcaaatcttgggtgaaaggatgagcatcagcctgggcgtctcaccgaagagatgcccagtcacttgtcatagagcagttatctgtccagttagcactcaacaactgagcacctcccataaaccaggtacaacccccgaggcatggcgtggacccctgtcctgtgagttcctggctaagggtcagtagatccttagcctgtgtcagatgacaagagaagtagggatgagtagggtgcggtgggggttaacgggggttgcttttgtaagcagacagtcagagggacccgactcaggagagttgggaggagaaccctggaggaagaaaaagtcggagtcagaaaaaaaaagaaaagaaaaagaaagaaaaaagaaaggagtgaattctagttgagcatttctttcctctttccaatataaaaaactgtatccaataactcattttagctcccaccagttacatggaagaatgtcagagccgctgatactggacagccatgagttgcccacatcccccatcccggacacacacactccccattacctacctctcccacatccatcccaactttacaaggggaaaaaaaaacttcctgccagcagttactaacagagtactttatccccagccctcccggaggtannnnnnnnnnnnnnnnnnnnataagaattgctgtctcttaatcttcaccaacactgatggttaaaatttttactctatagcagacagatgaaaaatgtagtttcattcattcaactactaccggtattaagtttgtgttctttggagattttcctgaggcaggatctccctacgtagctcaagctgacctaaaacttgcaacgaatcctctctgcctccgtctcagacttacagatctgaaccactgtgcacagccatttctacatacttattggcaatttttttgttttgaccagtagcccacctcttaatgtcctctatatttgtctatggtaggcttggtgctgttgttacaaatttgaacaactttatatatcactggttctcaaccttcctaatgccaggatccttcaatacggttcctcacagtgtggtggcaccaccaccaccataaaattattttattgtgacttcatagctgtgcaatcttgctactgttatgaattgttatataagtatctgatatgcaggatgtctgatatgtgacccctgtgaaagggtcgtttgaccccaaggttgagaactgctgctatatattaagcaattaccctccgtcctatttcctgatggcccgatatctccctcatcagtagctgtttcgtgcggcctctgctgcttccctgtaaagcccacctctctccacccagaagtgtgatttcactccacttcactctcttcaggtttttatttttctcagttggctttttactcctcctagagttcaccggagggtgcgggatgaagggcaactgtagattctttcctccctgatatcggacagctgtggtcctgatgctgtatctcctctacctctgatttgtggccctctggggatcatatgataaacccttgtggatgccaaatttgcttctggggtgtctgatctagctctccatgcttggtcagtcccatggccttttaattattaaggctttggaataaattaaaagtaatacagcccttttccaatttttgttgtgtcttgactaggggacttttccttattattctttcaaattannnnnnnnnnnnnnnnnnnntcatacctagcacacgctggcatggagagatgtaggtaagaagtgagagagggaaactagcagacacacaaagcaaaggaaaggtgagctgggcaaacatcctcctttctactctcaaatcttgggtgaaaggatgagcatcagcctgggcgtctcaccgaagagatgcccagtcacttgtcatagagcagttatctgtccagttagcactcaacaactgagcacctcccataaaccaggtacaacccccgaggcatggcgtggacccctgtcctgtgagttcctggctaagggtcagtagatccttagcccgtgtcagatgacaagagaagtagggatgagcagggtgcggtgggggttaacgggggttgcttttgtaagcagacagtcagagggacccgactcaggagagttgggaggagaaccctggaagaagaaaaagtcggagtcagaaaaaaaaagaaaagaaaaagaaagaaaaaagaaaggagtgaattctagttgagcatttctttcctctttccaatataaaaaactgtatccaataactcattttagctcccaccagttacatggaagaatgtcagagccgctgatgctggacagccccgagttgcccacatcccccatcccggacacacacactccccattacctacctctcccacatccatcccaactttacaaggggaaaaaaaaacttcctgccagcagttactaacagagtactttatccccagccctcccggaggtagggggtgtggccgcgaggctgcagtatacctcggaacagaagcactttagccactggggaagtccagtttggatgggcagctctcccttggtcaattgttttttaaaaagtgagaccagtgtgcagggtgcagggttgtctgtcagcctcaggaagtgcaaaaatatactgtggtccttacgccagccacccccacccccacccctgtccccgctacagcatcatcgtcctgctgtggctggcctgcccacaggggtcgagtgggtaggggaactgtgttttccccccactctgcctgtacacagctgtttttggcttggccacagaattctaccacaccagagttcatgtggttatccagagtgggaagaatttcccagaatgccttgagaaacctgagacactgaatggctttcagggcttattgatgtggctgtgcgcaggaaatagcagtacgtcaataaatagttttaggcaggaaaccgggcttaaatggtagccttggagtttggggaaaggcaccaggggttgctgggagggagcctgcctgtcagatgagaacctagagccaaatagcagactttgaaataactgcccctgagctgagaggccccttgctgctcttggatgtaagaggctgaggttaggggcagagtcaagacccaaggacaggcctgtctcagctggcagaaaggggctctttgtgtaaagagggaagctggcaacttctaacacttgtcaggaagagacacacagcctgtaggtgaggtgtcaggaggagacacacaggcgaggctccggcctctaggtgaggcctgttcacaccccatctggtagaaatcagtgaatcagtgccagctgccaatcaccccaagacttccactgtcctacttttaaaaggagaaaggggggaggggtcaaggaaagcaaccatcacactcagtacctgtttttctggttatgaaaagaaatgattatagaaatttagaaaaagccataaatacaagaaagaataaaggccactcccagttccaccttttggaagccaccatattaaacatttttgaacagtccttttaaaagctgtatctgtggataataatatatactatctgttttcatttagtgttagacaaacattgtctcgtacttctatacatttttttataaatttctttttcctttttctttcttttttcctgtttgtttgtttgtttgtttgtttgtttgtttgtttgaaacagggtctctgtaacagtggctgtcctagaatgtactctgtagactaggctggccttgaactcacagtgctgggatcaaaggtatagaccagacaagccaaacctcgtggtcatcactgattcaaccattgtctgactggctgctcagactcttgactcttgactttttatgttaagcctgtttcaaggtatctttacattcagtttatgtgtgctcacacacatgcacgtgtcgtagcttgtatgtgaaggtcagagggcagctcgtaggaaacatcgctttccttccaccatgtggaatcgaacttagatagtcagacttggaggcaagctcctttgctccatgagccctcttgttggcccctgaagaatacttttcccgtcctcattattacttcatgatagacacccagaggtgcaattgccagacgactgttaaggttaattaaggttcctcaggaaaaatgtatactgcccatatataagaaaaatgtatactgcccatatataagaattgctcttaatcttcaccaacactgatggttaaaatttttactctatagcagacagatgaaagtgtagtttcattcatttaactactaccagtattaagtttgtgttctttggagattttcctgaggcaggatctccctatgtagctcaagctgacctaaaacttgcaacgaatcttctctgcctctgtctcagacttacagatctgaaccactgtgcacagccatttctacatacttattggcaattttttgttttgaccagtagcccacctcttaatgtcctctatatttgtctatggtaggcttggtgctgttgttacaaatttgaacatcctatatatcactggttcttaaccttcctaatgccaggatccttcaatactgttcctcactggtgtggtggcaccaccaccaccaccaccaccaccataaaattattttattgtgacttcatagctgtgcaatcttgctactgttatgaattgttatataagtatctgatatgcaggatatctgatatgtgacccctgtgaaagggtcgtttgaccccaaggttgagaactgctgctatatattaagcaattaccctccgtcctatttcctgatggcctgatatctccctcatcagtagctgttttgtgcggcctctgctgcttccctgtaaagcccacctctctccacccagaagtgtgatttcactccacttcactctcttcaggtttttatttttctcagttggctttttactcctcctagagttcaccgtagggtgcgggatgaagggcaactgtagattctttcctccctgatatcggaaagccgtggtcctgatgctgtatctcctctacctctgatttgtggccctctggggatcatatgataaacccttgtggatgccaaatttgcttctgggctgtctgatctagctctccatgcttggtcagtcccatggccttttaattattaaggctttggaataaattaaaagtaatacagccctttccaatttttgttgtgtcttgactagggacttttccttattattctttcaagttacttttaaggtcattttttttaatcaagtctttatatccattgcccttgctccctcacacacagacagacagacagacagacagacagacacacacacacacaagctcatgttaggcttttataaattagtttttgatcattaaaacatctcactggtaaattgtgtcaggaaagcaagctgttgactttattatatattaatttaatatctagatactcatattaattagttactaaaccctgattaatctttattagaggttctcttgggtttttcatacatataatctaataattttctctctccttccacccatgggcattgccactgtttttcagtcagacccctcgatgtaatagattgcatttatagatttcctgatgctaaatcattacagccttcctgggatgaaagtgtacttgttataatgggtctactcgctggcatttcatttaggactgccccatccatccacattagagaggtcagccagtgcgcttccttgtttatgactgactgcgagatgtcgcctgtaaatgaccagctggcaagcccccctttcctgagccttttgggttcgtttccaaatgacaacaattatctcgcttttcaaataagcttggatgaatttccctattaaaaagtcataactttagagacctccctataaaggtaattctttcataatttgattttagttcatgtcttttcatccttcctggtcttgagttcttcccttttttttcagtaacgtagatgatatttatttttctgaagcattcgctgcatgcgtctttcgactttaacagagtcagatttgaccctgccttaccttcttccatattggttttcatagtaaatcttttctaatccttccttctggcttttgtatgcaattttctttttttattttctaattaatttccagttttgtctatattgtgttctttcctctatcttctttagctaatgatggttttctaattcctttggagagagttttggataacacagtctgctagaagtacaacgtagcctcctcacacacttctaaatggaattagaggttctacttcatctagtatatccaaaatttcagcacagactcaactttttaaaaatatttgttttatgcgcacatgcgtaagtgtggatacacacatgtgggtgaagatgactgtgatggcatcagattcccatggagctggggctaccggcagttgtgagccaccaaatggggctggaggtgtactcagattctctgcaagagttattaactgctgagctatctctctggccctacccaaccctttttaaatgacaggttttacattcttttttccatactgtgtcctcaaaaccattgtcacttcataagtaaacacactgttcagtgagcccctttaagcattcagcgtccacacgtgactagtagctatcacactggagaacatgggttagcacgccgagttctcttcttttgtttaatacccagcagtcagttgaatagtcagtaaacatgttgacctctcagtgtagcttgaaccacatcccacaagtgttttgttgatggtggcttggtttttggtttttgtttttgtttttgagacaggatctctttaagtagccttccctagctgtcctggaacactctatgtagactaggctggccttgaattcacagagaactgtctgcttctgacactacatcgggtgacaatgttatgtttgagaaattatagtagaatcaattctctatgtgaattgtcctaatttagatgtattaattatattactcaaatcaccaaagtaattcatcctgggccatgtactttgccagagacatcattgccttaacatcccagtgtaatgtgttccaggttctccttgcctcaatagctttcgctacattttgagtctgtcctgttatctatttattataaattgtattttatctttgtatgtaattatagctttatcttttttttaaaaacccactgattttattactaatttagttctcttcgtgtttgtccatagctaatttgacttgctcattatttaatataccctgttttcagtatgctactggttcctaatgtttatctttttaacgcacagtttttacatttatttattgttgggggcagagcacacacatgccacagtgtgcacgtggaagtcagaagatcacctgccaggctccattctgtccttccaacctgcagatctcaggggttgaacgtggttgcaaatgtctttcacccactgagtcatcttgccgatccagttttaatattcttcaaacacagttttactgtcttcaaatgctgtcttcaaaaatcagtatttctctgattagcaagctaagggaaaaacgattgacataagaatcttcagggtataagttaggaagtgaaggtcaccttttagtcttccattcgttcactgtctaacggtcttagccagtcctttgtaattggattttgaattattaactaactactactatggaattattatttatgttgaattttaaaaattagaattgagccaaccattggtggcacatgcttttaatcccagcactcaggaggcagaggcagtcagatctgtgagtccaaggccaacctgatctacagagcaagttccaggatagccagggctacacagagaaaccctatctcaataaggttaaaaaaaaaaaagccaaaatgaattttttaaataaaaattgaatatcttctcatctaaaaatttttcctggcttttgattaactctttaaaaaacaccctttaactggcttatttggacttaacgaagttaagtctgcctggtttcaatttcccctcctgttcttctatggcatgattccctctgaagtgaggtatatattttgccggctggaacattcattcaagaaagttttaatttttttttttgcttttaataagataatataaaaattgccatttcaactaccttcagtgcaccacttgacaatgtaaaatgttaaatacacattgttggacagacttcccccaaaacctcttcttcttacaaagctgagaccctgctgaccccgtgcctcctttctcagcacttggcggtttctgttctgcttcctgcaatgtcccctgactgcctgaggcccttgtctgcatctcagaatcctagccttcatcaagactgatttacagttaggaacactcctacttttgagctgccataatcagtttaccagaattggctgacggcaatgaacctcttgtgaaggtagttcagggtaaacatgctttatcatggccccttgtgtattgcctggtccatagcacaatgatattcttaaaagaagaattaataaacagatggatggatggatgcatgcatggatggatgcatgtatggatgcatggatgcatggatggatgcataggtggatgcatggatggatgaacagacaggcagatgaatggatggattaatggatggatggatgggtggatggatggatagatggatgggtggatgaatggatagatggaatggatggatgaatggatagatggaatggatggatgaatgaatgaacgaacggacggacggacagatggacggatggatggatggatggatggatggatggatggatggatggatggatgactgagtgaatgaacaggcagacagatggacagatggatgggtagacgggtggacagagagatggatagacagacagatggatagataagtgagtgagttcatgaagactttagattctcctggtgggtggacatgctggctcaacactggccatgaaagcctggtgacctgagtctgacccctccaagccaggtgtaaggggaaggcgagaactaactccacagtcatcccctgacctccacaccatggcacatacaccgcacacacatgcgcacacaccaaatattaataaattaacagtgttttctattatgtgctaggcagtagtgagcaggagttgtacttctgctttgagcctagcacaagggctaaagtgggccttagttgtagactgcagatctgtatgggccagtggcattctccttcactccctgagaggatggtgatttgagagtcagacaaaggaggtgaactgaactgaacttagagataatgaatgtgagaaaggtgccattcccaacacacacacacacacacacacacacacacacacacacacacacacactcacctcaacgaccaccatatacatccccagcccatagtcttagggacatccagcccaggctgagagacatctgtgaaggaggaagatggccaagtcagagcaactcacagaagaggagcttgtcccccaacccagggtaaccggaagtggtggttcctagcctcattttaaacccaagtccgcccttgtgctgtgctgggatcctgggacccagctggtgctgcccgggcccctcccagcccctcccagccccagtgaggttgacgttctcttgtgcctccacagaaggacttcactgtgcgggaggagctgcagcaacaggatgtggagcgctggctgggcttcatcaccttcctgtgtgaggtgttcggcaccatgcggagcagcactggcgagcccttccgagtgctggtgtgccccatctacacgtgcctccgggaggtaagagcaaagtgtgccccatctacacgtgcctccgggaggtaagagcaaagtgtgccccgtctacgcgtgcctctaggaggtaagagcaaaggctgcgcatgacctcggtactgccctgcccacctgtcggtactaaaggaagccctgcgcatataccttggagagagacacaggagagcaatggagttgggttacagatacaagaatgacttccccatgccttaagaaataagccttgactcagacttcagtaatcttaaattttagttgaagaggtttacggtgttatatcactgaatggatctttggacttggttggtttaccactgatttttttttcctttaatgttttgcttctaaaatttaactttaaaagtaataaatagggggtggtgtgatggctcagcagataagagcactcactgctctaaagattcaggtttaagttcagttccaagcacccacgtggggcagttcacaaccacgtgtaactccagtgccctcttgtggcctctctgggcactgccacgggcagtgtgcacaaactcatcgtacatataagaataaaagtttttaaaataataaaataagagaagccaagagactttggagacgggagtttggggtgcttgctccttcacacataaaagctcactctgaaaggtcatctgtggctggttgggggacagaagtagacactgggaagccgactggaagccaggtagcagggaaacatcccagctcccactaggagggatcgagccaagggtggggctctagcatccttaagagcagcagccttcaggattggctgataggggatggaagggagggagataggatggaggtcctatttcccagccacatggccacatcccctgggatgtgagactcagaaagaaaatcactgtggggatgagagccaggaattaggcctctggacatctatttgggtcacttgttgactctcctcaaaggcagtcctgagggtagttggcagaaagatctaaagtgccacgaagggccccatggggagtaaggaaactacttctgtcaggcatgtatgggcacctgaggctaaaggcaagacaagggtgatattacccagtaagagagaacaaacagggagatggtacagtcatgtgtagaggagagaggaagaggaggtaagtcgggatttgacgcctccagagagctccagaagagcaagtgaaaggcatgccagcatccttcagagggggctggtactagtcctgactccacccatcccagtcctgactccacccatccctgtcctctccttccctggcagcccttagcttccaccaggacacggggaagggatgggtgaagaaccaaaggtcctcgatggagaagtggcaagaagaggggtcctggagctctggcagagagaccagcagtgtgggcaggtacttcagaccatgttctgaaaaaaaaaagctatgagaaaaatggactgaaaggaaaggagcagcatcaagaggcatgcttagtttttaattgactataataagcagtgtgaacaaaatgagaatgcgcttgtgtttggcgagcatcccctaataggacggtggtatgctcatcccagcctaaagcagagcttacatcccctcgggtcacttttgaacccacagcactgagctgctctatgctggtggtctctgtttccttatgaatatgcttgactttagagatgcctcagtcatccagttcacagccacccctgacttgattttactcttcggggggcctcagttcagaggaccacgggcagcttggccttttgtgtcccttcggagtgagcagaaagtgcccccttctcagaggctcactcctttccacgtggccatgagccacctccacataagggacagtgacctggggctgtgacctggatttcccgattccttctgcatgatctgggcccctcctcctgctgttgtcacctgctcctccagcaggaagcaggactgttgggagtgctggccctggctgctgggagatttttcacaccacctaaggtagtgcaaactctgtggtgtgagatccggaaggtgccaagaggtctgtataggcggggagcagtgagtgaggccttcctctgtgcacacttgttgaatgagttaagttttgcaggagggacattttgacaagcacagaaccacactgctctcatggtcaacttgagtggtgagccatctatctgtctgtctatctatctatgcctttccgcattttgtacaaaaggaaatcagagagccactactagggtccagctacccgctgccttgcagtcacattcgcccaggttttggctgtaccctcttggggaagaaatagggcactctgggcttttctcaattgcaaaaaaaaaaaaaaaaaagtctcacagcactacagcactttgagtgaggaaaaaacatttaaaggaggaaaaattgtgattttagaaggttcagtccatggtcatctggctctgttgtttttgagcctgtggtgagccagaagcatcacggaggaaggggcatgaagaagtaaaactgcttaccctgtggcagccaggaagcaaaaagaataagaaagaggaaggcgccaagatggagacatacatgtgtgtgtgttttcccatgtgccttctcgacttcctcttcacatcctgtgtttgcttaacatgttcttttcagcttactctcttcggataggagatggtactgtgggtaaagcacttgcaaattcaaggactggagttcagattcctcacacccatttcaaagcagatgtggcacagctgtaacccagtgccggggaggcagagatggggttccctggagccagctggttagagctagactagccaagtccgcaagctctaggtctattgagagatcctgcctcagttaacaagatgggaagtaatcaagaaagacacccaacatcaacccctgacctccacatacatactcgcatgcatgtgcacacacatatacatacatgcacaacacacatatgtacacacacacatgcacacgtgaaaaaaattaacatcataatgctgacatttacaggagatcttccttcttaacagatccttaaatgtaaatatggtggtattttctatgtacggaacacagagcagacctccagactcatttatctacccaactgcagcatttatacccactggtgagcaaagagctcccacttcacctccctcagccttctgaaaccatctctccgttctctgactcagtcaatttgatgatcttaggcacctgatgaattagcatggtttctgttcctaccataccagatgttgaatgttttgtctttaaaaaaaaaaaaaaaaaggaagatttatttatgtatttatttagcttacagtttgggaggctacaagtccaaactccatggtaccaggtcctgaaactccatcatgccatagtgggtggcacataagaaagatcacagaacagtgacagggagccagggagtgatgcagaggtcagtggtcaggcctgctctttttatgacaactggagaactcgccacagtgttcaccccttaggggatagtctcacacacacacacacacacacacacacatacacacacaggatctgatttcttctcattatgcctccctcttctgaaaggttctatgctgactcccaacactgccacactaaagcccaagcttccaacacacaaactcttaaagaacaaactactccagaccatagcacctgataggactggagccatgcagtagtaattactctccttggctggcttgtttgactgagtgtaatatcctttaggctcatccacatagctggtattaagggatttgaccttttgaacactggataaatgttcaagtctgtatgcgcaccatgtcttctgcactcaggcactgatggccagtccaattgtttgtcaccatatggttcttgtgaccactactgcggtgaacatcggaatgggtgcagaaatgtctggaaaccatgatttcgggtcatctaaataaacccagggatgtggttctgtttagaatctgctgagcctgggtacagttctctacagccttattttacattccacaaacatcatacaggggttcctggtttgctgcagcctcaccagtccctgttttgtgatcataggtactaatgaaatagctcactgtttggattaacattttcctagtggctgatattgaatatctcctcctatacctgccagccatctgccatgagttcttgggtgaaatgtctattcaaaccctttacctactttctggctctgttcctaggttttctgccattgagtcctagaaatgtcatagaccagtggttctcaacctgtaggtttcaggcctctttggtgactgaatgaccctttcacaggaattgcctaagaccaccagataacacagatatttacgttacaattcataacagtagcaaaaaaaaatacagttatgaagtagcaatgaaaatagttttatggttgggggtcagtagagcatgatctgtattaaagggtcgcagcatcaggaaggttgagaactgctgccttagatgatttgggcattgccactttacttgatgtctggtctataatattccctcccattgcatgggctgtctctcacttggatcatctcctttcctgtgcagaagggtttggggttgacgtaagtctacttggctggttttgcttcacagcctatatttgtagttacacctcaaacccaaggctgggtccatgtcaaacatctggtcaccgtgttttccaatagttttatggtttcagagtcttgccggtgtttaatctatgttattactcatatagagtgaggtagggtccagtttcattcttctgtatgtgggattccccaacaccgcttactgagagactgtctttcccctttgttgaggctcagtcagtatgtaactttattcccattcatgcatctagaagtctgtttttatgccaggatcatgctgtttggttactgtagctttgtaatatattctgaagtcagggtccatggcacctttaattttgttctctggccaatattgctttagtcattttggggcttttttgtggttccatttgaattttagaatttttaaactatttctgtaaaattgagaggctgtgagtcttatatagattgtgttgaatctttgcagcgttgtggttgcttggtgtagacatttgcgagatactaaaccttccgatccaagatcacagtcaaggatactcgctatatattcatattaagcatagttctagaagtcaccagaagaatgagataggaaacatgaataaaaggcaccctcatccaaaaggaagacgggaaactgtccctatttacaggcaacatgatcttatatatataaaacatttagttgggcatggtggctctctctggtgatcttaactctggacaagctaagacagtagaatcatgagttccaggacagctcagacgatagagcaagactgaatcaaaaaattctgtagatatccttcaaaaaactgtctcaagccaggcatggtggcacacaccattagtcccagtactcaaaggcaagtggatctctgtaagtttgaggccagcctgatctacataacaaattccagaccacccaaggctgcatggcgagacttcatctctaaataaataaataaaataaaataaacaaattcaataaagtcccatgatgcaaaaccaacttgcctttctacatactgataatgaactatgcaggaaggaaattaaggccacaatcccatttacaatcccattcaaaagattaaaatgcctggactaaacttaactcatagtaaagtaaaagatttacacactgagaactataaaacattgtaaaaagactctagaagtcacaacttgtaagacaccccattagccttaacagaactctcagtgtacagtcacctagcccaggaccttaggcaaagtgactgggagggctccacactcgggaacttccagcgactgacccgactgaccgagttggagtatggcagggtctcccccgtggcagctggcttctctgggccagcctggcccagctgggtctggttggtcctgcacctttcagctatgaccttcaaggctcactattcagcccctctgtgccaccaatcaccttctggcctcaggagcgtgttttctagactcccttgggtgattattaaacgcctcccgctgggccccttacttgaagggcttgattggaaattcctgtggcaggggaatttttcaacaaagctttgtgcctgcagtctcctcacttccttccctcccccaaacatcctaccttccctctctcatccccagcctatctctattggtaactcacctcctgccctcctcagaatcctgcagccacagacacaggtcaggagtggagcaaaggagttgaggcagggattggggggcactctgcctggaatccttcatacctgtagtacccctcagcttgtcccctccacctgtccctccatgcgtggtggccccgaggggtctgcctgtgaagagagagccctcacagaccagcaagcagcaagctgggctgccagaggaggcagacaggcacagtggggggaacagagggcagtaagtcaggctcctcaggaaatgaaactgctctgtgcaacaatgagggagacactctctgaactttgtgcgtgagtgagcattcgattgctcgcattgttttggctccggggaaatctgacctcgggaaaggccgagctgaggtgggtgtgggtagtaatgcaggatattcctcaagggcaccttgccaggaggacctgacttcccagagcagggggaggggtctgcttggcagcctagctggggccaaaagaagcccaaggtaggctgggctctgggctcccctcggggaggggagatttattggctggatccatgggaaatgatcttcaccctgcacctctggaaggtttacaaaatggctaattcccaaatcagcccttgaccctctccctcacccagtaaaaccaaacttcctggggatggatggggttgggctgtggggatggaagctttccaagttgattctgggctgtggccatggttaagtgacaggagcccccccccccccattccaggtgcgtttagtgagccgctactgaccaggcaggagcatccatctctcgggagcacctggccttaggcactgagacccaagttcaaatctcagcagctgaacttcctgacaggcattcaggaaaagcaagtgatacgtagcagccctactgtgcgtggcccattgtattgtgctgctgtgatgtagcatgtgtctcaggcgtgactcaagaagagtcttacctcaggaggccactaagggagaccatgttctgggcatccagatccccagagtcagacgtgatacccctgccggacaccctcccccaggtgtacatgggtaaacttgtatccttcctgtcttagctcttcctcacaccctccctccatggtgagggacttgggggggggggtgcctcaaattcataatcccttgctgcagtctccagggtgctgggattagaggcatgtgccaccgagcctggcagtttgcagttcttatagagtactgaagagctaacttctgcccgaggctgtcagcgtccaccctctgtctggcatgttgttgtggtaatggcttgtgaccccttcctgagtacttcaaatcatttcgtccttctgttggtacttagaggctaaggttcacccatcacaaaaaccctaggattctattctctttcttgacttttttggtgtttgtttgtttatgtcagggtctcatgtaagcccatgtaggtcttagtgcctctaaatcactaagtagctaagagtgaccccatactgtgggtcctcctgtttccatctctcttgagtgctgggatcacaggcttgccccaccacttcaggttgtgtgcatgcaagcagagaagtggtctgactgcagttctcctgtgagccccaggaagaaacattgttgcgatccccaccccctttcaacgtggcaaccgcatctgcagaaatgacatagcccagtgggttgggaactcagtgactatgggggaaagagggtagagggggagcaaggaacagctggggacaaagaggaggcacttaccagacccacgctggtgtatgcaagatgacatccaagagtgtctagaagccttaagcctgaaagcaataccagtaactagagcgatgtattctttcaactagcaacaagaaaaaatgctacttccttactggactaaaatgccctgagacaacaaagtcaccaaagtttggagacagaggatcccagggaactcaagcactgtgggaaatgtagccctgcagattcagagtaagggacatgactggggaagggaatggtggagccctagagccttctgagcagaaactgggtcctagcccctcactgttgtgggaagtgtttgtagtgtaagagtcggacagggcatgaagggaggaaaggaagcctgtaaaaccaggaggctctttctccttgaacagtttcttttcacctttaatcttgagtccagaatcttagcagaatgtttctctgagcatgcagccaccccaggctgggtacccaaagccctgagctcttagtttagcatcggagtccctacaggttccaaggctcaagttatgaaaggttcaacccttcctggaaccctgctaaagtaacccacacaggtttagtaccccccccccccacccacccgtgtgtgnnnnnnnnnnnnnnnnnnnntcgctcgtggtgtgataccgacctgtgcagaacacaccaccgccaccatgcatccacatccgcatgcgcatgcagaggcagtgcctttgaggcagcttcacaatccagcaggagttcccacccagcccaccagcctttcctcccccacccccaccccataacagttctgcttccttagccaggctgagcacactgacatgtgaaatttgaagccagtgttccccttagcaaccatggtaacacaggatctgatagagagcctgcagttataaaaataccagcttccaccagacactggtttccaaagggaaaccagtccccacaccagaaccatttttaaacagtcttcagacttcagagatggccagcatgctcctagtgcagtgtggctgccggagactgtcacagggggctggctggcttatagtaggcagcgttgggtatgttctttgaagcacagaatggcctgtgattcggcaaacaatgaactagccctatcaagggtacattggtgatggtcattttcctgattggaccaactcttttggcatttttaagtcagggtgagatgcagagattctgggaccctgtccttccgggtcccttctggagagttctcagctccttatcacctgggggacaatgacttggtctttcttctttttgtggaagtcaataagggctctcatagggaggggagagatggtgtggctaaaaacttttccacttacaatcaggaaaagccctgcatcttgtacccagttctgagcaggctgcagtcttcgttcctagtctgtgttctcagtaggaggcattagccttgagatgaagcaggggcctgggtatgtgctcacccagcctctggcctgttctcctctgagccccgcctccccatctcagtaacagcctcccctgccctccctctcctgttcctcccagccttttgtctcccggggctatgccttgtaatttgaaaaatattctaacttggtaattaatgtctgaacttggagagcgcccccatcctgcttctgcctagctagctgaaggcgggccaagatgcaaattcagagaagctaaaaggaggcatgggattttccaagatggtcccttagttttgggggagggggttaaaaaaaccacacatgagttgcccttgaacctcccccccccccccaccttggccatttcccaacaggccgatggcagagtcttcagctccacaaatttgggaacactcaagtactagacagggccactctctgagagcagttcacagagaaattatctgaggtggggggagagagagagagaaagagagaaagagagagaacatacaagcaagcaaactatgtgtgtgtgtgtgtgtttgtatgtgtgtgtgtgtatgtgtgtgtgtatgtgtgtgtatgtgtgtgtgtgtgtatgtgtatatatatatatatatatatatatatatatatatatatatatagagagagagagagagagagagagagagagagaccaaaaggaagattggagagcattagctgctcttccagaggacctgggtttgattcccaactcatggtggctcacagccacctgtaactccagtcccaggggatccaatgccctctcctggcctccatgggcaccaggcaggcaaacaaaacactctaaaggagaaggaagacatagagaatagctactcgggaggctgaggcaggaacaccagaagctcaacccttggttacagagtgcgttcaaggcaaggttggacaactcaggaagaccctgtctcaagataaaaggtaaagagggtgtagcatgagaaagatctgggttctggggtcaaggagaagaaaggagggcaagggaggagggggatggaggaggaggagggaagaggaaggtgtcatgagtctattatgttagaaacatacatggctatgtttgtgtctttccagtttgttaaactgaataaaacatatccataagctacatattggctacaatttgccacatagttctaatttcacttaactaaccattagcaatattggtttctcttattccaacttttaaaaaagttttctagatttctttattttacttcatgtgtgtgaatgttttgactgcattcatatatgaattcctcatgcgtgcctgttggatttcctggggttgggtcatgatggttgtgagacacgatgtgggtgctgggaatcaaaccaggtcctctgcaagagcaagtgctcttcttaactctggagtcatccctccagcccttactttattagttgttaatatcaactctcaggtcatacattatcgagagagagagagaagagttaagctgtttgggccccagagttattcagtcagtctcagagatgcctcttcaaaggccaatctgaagtaggctgagtgtcaggggcaggagaagagcagtcaagcctgacacagaggcaggagccctttgctgtgtggttctcctggccatggcttgcggtgtgcgagtaggtgaccagtcggcatcccaggcacactgcagactccaggagtgcctcctctacactctcaggcgaggggtggtacatctgggtaactgacaagctcgcgcgcttggtgtttctcatatcaatctaatgcagtttcaggctgttattgatcggcacaacgaattatttatacatttgtacttctcgctgttttggcaagtggtagtgacttgtttgtgtaaacaagatgtggagttgttctttcacttgatacttatacccaaaatgcagcgactcctgtactgttgctctatgggggagtgggggtggggaggagtcactgtgggctgggcacagcccgaaggaacaccatggcctgaagtaggcccagccagttgtctaggacagaaaacctgacgcttgctctaggacctggaagtgcctgaagcacaggagacatgcatgccacaacccgtgatgttctcagccttcagtggctctgcagaccccagagttcacagttagcctggctgattgatgctactccatttccatcagccccaccgtgggtcagaaacggctttgggagtgtgtgtcctcctagaagagaaacccagaaatcacaccccttccttctgtctacttagacgcagctagaacccaggtcctttttgataggtctgggtcagtagacacaggaccgagacttctaggcctaagccaagccctagaagaggaagcctaaaggagaggcccgttcttggcaagaggggcgcttagaaaaaaaggtggtttggaagctgacgaactaacaccttcccctctctggccttcaggcttctttgtcaggaggcaccggataaaatggtttgctcattacaagctaacttcctctctacagctccctgtctgtccctctacagctctgacaagtgaagacagggaataagggtccctttaggtgtgtaagacaaagtgtctcttaggaagaaaaactaaggagagggaagctagtaaaacaagcctttgcacacacagtgtgcctgctcttgcacacacagtgtgcctcctgctctccagacactctgagctctgtttagatttcagttcctcagaagggtcccaaggactcgtccgtcattccccagttggctacctgtccctgtcctcagcctgccttctttctcttcatgacaatacttgctgttacctcgagtcttctttgtcaatctgttttttttttctaccgtgggaactctagaggcaggaaatgtatctattcatagctccgttcccagtggtgtctgacatacggtaggtactcaataaacacttattgaagaaactaacgaaataacttgtctagaccgagcgaactgaagacaatggtcagtcagtcagtcaatcagcctttcataaagaactgggggtgggggtggggcaggggagaagtgctgggggggttggnnnnnnnnnnnnnnnnnnnnnnnnnnnnnnnnnnnnnnnnnnnnnnnnnnnnnnnnnnnnnnnnnnnnnnnnnnnnnnnnnnnnnnnnnnnnnnnnnnnnnnnnnnnnnnnnnnnnnnnnnnnnnnnnnnnnnnnnnnnnnnnnnnnnnnnnnnntggggcaggggggggagcttgtcagaaagaagtgcaggatcctcaaggaggcccagtgagaggcacagcaggctggtctttcctctgcatccgtccatatgcttcctggaaggtgcagatttaattcacctgcccagagtcaggatcccataagccagcatcctcaggtgagaacagaggggttccagcaaagcttccaggagcctccagggaggacacccccaaccccacctgctgctatcagctacacaggacaatccaaggggacatcagccaaaaccctctgtcactaccataaagaggaatgagagggaggaccccaggctcagagggagtaccccaggctcaggagggcccctggggatcaaggatagaggagggtaaagcagagcgggaaggtggagcggctggggtggaacgctatagtggccgctgagaagcccagtagttctttccagtccagcagagtctcagccacagaaccgtggccggggttgccatacgtgaagccacatctgcagttttcaacttttgtccgttgtttttgtttattgttgatttgtttctgtgacagggcttcttgtagccctggctgtcctggaactcactctgtagtccaggctggcctcgaactcacagagatcagcctgcctctgcctctgcctctgcctctgcctctgcctctgcctctgcctctgcctctgcctctgcctctgcctctgcctctgcctctgcctctgcctctgcctctgcctctgcctctgcctctgcctctgcctctgcctctgcctctgcctctgcctctgcctctgcctccacctcctgaaggctgggtgtacaccaggaccttctggcttgcaactttcaatcttctggtagccacatttaaagccccccaaggcgtagggagtgtgtgtgtgtaaaatatttttttatcaatggtatccaaataattataattacatcaccatgtaaccaatagtaaaaagtaccaataaaaaatttttgttgccattgggttttttttgttccccagacagagcctggctctgtagcccaggctagtctggctctgtagcttaggctggtctcaaactctctgtgctcctgcttcagcctgagagctaaaaatcactgcagcaatccatatttttttatattcgtgtgtttgtgtgtgtgtgtgtgtgaactaagtcagtgtttgaaacttggtgtacatttcaccatgccggcaccactcagttcgggccagacaccttgtaagttctcagaccacacgtggctgctggctacggtagggaggctaggtaggtgtcatcaggctcttggaacagttctggatgctggaagtcccacaagtactgtttgcagcttccatctctctcaacacccagcagaaatggggagccataagagctgaaccccaaggctcacagccagctcctggtggggtctatgaaaagcaggtcttcaatccctgatggacaaagcaggcggggggtggagaggggggcaggagtataggaagggagaagggccctggctggggtggcagcacatgagagggctcagaggagaacccacggtggggatcagtgccagggcctccctagagtgcccggcatgaagaaggcacaatcggcccattctttcactgccctccggactacttagggcgaccatttctgtaattaagactttctccctttctcagaggtattaaaacatagaagtatttactgcatctggtttcccagggttgaaagctagctagacttaggaagtgcaaacactctttggaaatgcaaacacacttgcaggaacgaattctctttgaatcaaggctgaagccctccttaaaacaattagtcctgagaccagaaccttaggtacaactcccctttgtttggttgtgtggcccgccaccactaccttcacccatagggggatatgaccagtcctcggggcccagggacaggaagggaatgaattggtctgctacttctgggtctgggctggcctgcgttccgcttggtttggaaatgttagtcagaggagagtttgaggtgtggggaagggcagggaggatgtggtttgggcaaggggagtccagaggcttccctgggcttggcccagtgccatgggaagtctcagaacctctgccggccacactgaagtgccctgcctggctggagctgagggcgtggccaaggattagctgactggagagcaattagatgaggtggggctggggaaatacctggaaccccagggatagagtcaagacttgcttggctaaccctgaaggccggaggccttggggggcctggggagttaagtgtggcctcttgctgatgggcagaaggggattataatgtcagggatcagggagtctacagcactctgagaaagaggcttttttcttgatgaccagttgctaaatacctcttccacctgctcacattcctgcccagacctgtggattttcctgtcatagccgcatgggcttgggaggtgtggtatgaagtgacccttctggggatattcatctagggggaaggagaagtgagaaaaatgggtgccttgaaggaaaggggtgctcatctatttgaaaggtgtgggcaagccctgccaagactgttgcccagaaaacccccacaaacattacagcttgcctaagtcctgtcctctgcacagggaagcagacttgcatccgaggcctgtccatccgctagaagcgaagtctcaggtgtgcctatagacgttgagagctctcgattgctcaatagaagccttcaggattaccttcatgccacatgcagaaggctaagggctgatcagcccagagcaggagtcccttggttccaaaaagcttcctcctcacccctccctactgcttccctccacagaacctcctccacagagccatataggaaatactttttaggctttgtgggccaataggcaaacccagtccaactgcatcctatgtcttgaagtacaaccagccatcctatccccaagagcagctttgacagtgactgtgcttcagggaatttatggacactgaaatctgagtcataatttgtacgtagcacagcacagccttttgaaagaaggggactttaaactgattccctatgagtttttatattttaaaaatctaataaatataaaaatattttaaaaatataaaaactgttcttcgctcgagaactgtgaaaggcaagccttggccggctctgcttggtggctgtagtttaccaaccctggtctagagctgtggttctcaactgggaaatccccattcaggaggtttttttgctacactttcgagtgagaattgctgtcacaagggagaatttacaggttcccaggcaagcagatgccgtagcaatagggccctgccctagtaccatactctagtctggccccatgcctgttttgtagatgacagaactaaggtccatgtgacagaactgtcctgtgaacccaggcagtgtctcgctcttcccagaatgcagagctagaggagtttttatctgtttcgagccactctgggagatctgccctgccagctcacactgcccggagctctatctgagacacaggaagtgtatttgtcccctggagtcccagcatggcagggctttggtgagtcattttccacaagtgaagctgggtacactgaagtatcttcatgagaaactcccagccagcccagagccttcttctccttctctctctctctctctctctctctctctctctctctctctctctctgtgtgtgtgtgtgtgtgtgtgtgtgtgtgtgtgtctgctctctgggaagagggcattagaatgaaggacagagcatcagatgcttagagtaacaggatttgaagatgccacactggtggtgttttagctgcagcctggggcaagtcctttttcttcagtaacgtgggagagagttttgtatctgcttctctcctacaggaaacgagaaatcaaacttgtcaagaacagcactgtatctttatcggtcatcctggcttcccccctaaccattcaactgagaaggcacatgatctttctggtgacacgggagacccatcactgtgttgatggccctatggggcagtcactcttcacgtccctgacgcgtttccactgatgacttagtgtgagaagtgttgaagccacatattcggcatgcctgtgtggccctcagattctggggacccactgagacatttggatataaacatctgtgaacctgtgtgtgtacactttttctggggaaggcaacagtttccatcaatcttcaaagggttcaatgttgccaagaaagtcaaacatggggctgagccatgtacttagttgtagagcacctgtttctcatgtgccacacctgtgtctcacatgggccacacctgcatctcacatgggccacacctgcctctcacatgggccacacctggcttctattcccacacgcccggcaccaaacacaacaacaacaacaaccactacaacaacaacaaccatagtaagttcagaggcactagcttcctcccttcctatccggtgtccttgggcacattagagatgtctcattcagatctgaatttctgtcatctcctaccttgtccaactaattcctaaaatctaagggcagattctcctggaagaaaactccaaaaccgagtagctgagaacaggtagggttagggaaagtgctgctgtgggaggagctagctaccactgcccatagcaacagattcaatacaaagttgcggttcccaaatgcagggccaggcagtaggctcagccggctgcggaggcctaaggggatgacggctcattgcctctgggagcagctctggttccatttcttgacctggcattccttttatgaaaaatatatccaaacacttggaatttgggcacattttcgcaagtgttacatttaaataaaaagttttctcagcgatgtccaactgagaaaagttaaaaagatgttacaaaatcacccccttacggactatgtaatttcgctacaaagttagcacagagctgaggaaagtcatttatacataaacgcaaataatagtgtaagattttaaaatactcctaaagccagctttaagtgtctctctccccaacccaggctgctatctaagtctgcttgcataaccttggctggctttaatcttcttatgagcccacagactgcccaggctgcctgtcagccacagtgggcctgtctaggttcccatctagctgtgatagtctgtccaccagagcaatggccccaactccaatgtacctactcctcttcctgtcttcccagggtcctctcctatctcttaccttccattacctgcagtgggagctcgttcacatcagccaattcaaggggagaaacctgcccttgaccccacactcccctccagcaacccctttactgtacaactctgtagagccaggtcttgcaaaaagaaaaaagaaaaaagaaaaaaagagcagtctccttacatgctgtctccctgagcagttctgccccaccaagccaacagcatagaacctgtcaaggctaacgtatgtgttaagcatccattatctgaaagtccactgtgttccaaattcctagactttttgtatacctatatgaatccacagatggaaaattccacactatgagactttatttcatgcactaaattagtttaaatgctatatagaattatcttcaggctgtgcgtctatatggtatatataaaacataaacgaatctcgtgtttagatttgggtcccatccccaagataactcagggatatgaaatattcaaaaattgagagaaaaaaatcagatatccaaaatacattcaatcccaagcatttagatagaataaggagtacttacttgtatttaccaatgcctcgggactgttctggcttcagcctgactgacattggctcaaaagtcagctacagatgacacattgtagattttggtcatcatccttaccattgtcattattgctgttttgagactcatttcatagcctaggctgaacttgaaccagccactctcctgctttacccgtcgtaagtctgcaggcatgtgtcactgtgtctccttatggagtaaatgtaaatgagtgtacgtgactattccagcacactttttttgttttgttttgttttttatggactcttgaagtttgagttttgtataatttttacattgtagctaaatacattttcctcggccatttaaaagtgtgaaagctgttcttagctctgtagagagcaaatgcccatctgaaaatcagtgcacagaagggcagtggtgggctgggtggggtataattccacgcgcagctacggttctcagctatgggtatttggcaaggtctggatatattctagagttgtcactactaagggtttctgatggtggctggcaagtagaagttgaaatgccatagaacattctattctgcacaggaaaccaccacagcagagttatgtaatacagatgtcagtcacctatagctgagcgccctggtctaaatgacaccatcggctaaagactgctagagccctggaggttcttctatgctaaagacttccctgtgcctctccagccagaaccactcctgagctccaggccctgccagatcctctctccagacagcttcagtggtggttcatatagcctctgcccatagaaggtttgctcaggctagaaactcaggtgggcattctcctcgacttctccctcctggtccccagatgaatcacttcccagctgcctgtccccatgtaaacgaaggaaataaagttgatcgttgtgtcttcctgaaactagtctccctcccagtgacctctgaagcaagcagtgtgagcacatacttacggatgcaagatgggatgaaggtgtacagatcgcctcctcagaatcaagggcacacagtgcagtacgggagacctgactcgaggccaatagaagtggaaggattagccaggagatgggcaaccctagcccctgaggtaccatcgcaggagctatgtaggatcaatagttcccccagactctaaccacacaaaccccagactgtagtccgagctgtacccatctctctccttaacacctcatcctgcctgtccacagatcccctcagacttctaatgccttatggacccacctcctgctccccaaatcaacacctctttgcagagccacccacttgtggctgcactaagcccaaagctgtttcagactctcatcttatccatcctgaacctgccagatcccagggctgtggacaacttctgcaactcccttcgatctgatcactttgttctctctcagtggctcagctaggctactctaccttctatctgagttactaaccagtattctaaccatgctttcctctaggcccctgccctgtttctgtcccctctgctaacactatagcccactgatcttttccacttgttccctgatctccccagaaaggtctctccctgggaagacttcctaagccttctcctccacacatatgacagatgggtgggtgacactctgcctgtcatcccaccctcaccctgtgccccatgcaggccacttagtggtgaactcccgctgatggagctgagcttgctgtacactgggtattccaaacgctttatgccttcatccctggttccagtgttccaagtaatgtgtgtcttcaattcctgcagcaatccacagaggaggagactattgctgtgcccacagtgccaattaaaaagctgagacgcagccaggcgtggtggcgcacacctttaatcccagcaattgggaggcaaaagcaggcagatttctgagttcgaggccagcctggtctctctatacagagaaaccctgtctcaaaaaaccaaaaaaaaaaaaaaaaaaaaaaaagctgagacgcagggaggtggccactaagttgtacagcctaagtaagtggcagagttaggattagtatcctataccctgcattccagacatctatctgctgagctctgggcctctttaatggatggatggatgaatggcaggtagatggataagtgggtggatggatggatggatggnnnnnnnnnnnnnnnnnnnnnnnnnnnnnnnnnnnnnnnatccctgaggggccctttggagtagctttgccctagacagtatatattctttcagacctagtctttcagtcttccaagagggtcagctaggcacaaacctagcatgagcaatgtgaagaaatctagtcttcacagataccacaggctgggagaaaccaaatagttgcctccagaccaggaatagtgagcttcttgccaaggacactaggggagctctcgggaagacttcagggagcagggggaagggggagaagaggaggacaaaagagggctagggatgaggaggaggggaggaagggtgtgaggtagtcttgaattatcgaagaagtggtggagcaaggtgtgttcagccggggagtgacgatgaggaagaagggtattggggggctggtgaggacaggaaggatagcaccataggtctgcaagccgacaagcttggccagaaggaggtctggaagaggagggaagacaaggtaggccctgatggaagtgggccagggagcagaaatgccagactcagcactttatcttctcgagacacagtcagttgaacacagaaggacagcatggagaacaagaatcttggctggaggattagtcatctgaaaagatgcccccagctgtggtagcactgccccattcttgcatgtctactctgccaagggttaggctctaaaaccaaacacacttccaggtgccaattaaagtctcttatctctgagtcttggcagagtcctcaccaaatcccttctgaggtccccaagtggccccaggccctttgctcagcccaggcctgcctgtctgccctcctgctgggtgcctgacactcttgagtacaatgctaattatgcctttagcgaaggcctattattctctgaaagttaacagagcatacttgtcccaggcccagctgtcctgacctgtttgtccttgcttacgtctaacccattaaggagccggctgggttttgtcactccaggaacagccctcagtccagcttctgcagtgtggtttctgcgaccttatcttctccgtcatagaaaggccacgcccctgactaggatccagaggatccaggtagctatggactcctgtgaattcttttttttttttttttttcgagacaggctctctctatgtagccctggctgtcctggagattgaaatgtagaccaggctgcactcacagagatccacctgcgccacctgagtgctggaattaaaagcatgccccaccatgcccagctttatgggctatttgttttgttttgttggtttttttaagacagggtttcctctgtgtagccctggctgtcttggaacttactcagttgtccaggctggccttgaactcagaaattcacctgcctctgtctcctgagtgctagaactaaaagggtgcatcaccactgcctggcattttacgtccattcttttttgtttgttttttgttttggtttgttgtttttttttttttttaagacacacacacacacacacacacacacactgtagctgtcatcaaacataccagaagagggcatcagatcccattacagatggtgtgagccaccatgtggtgctgagaattgaactcaggacctctggaagagcagtcagtgctcttaaccgctgagccatctctccagccccttatattcattcttaaatgcatccagagaatattgatacatgggagagactagtttaaacagcatgtattagttttgcttacacacacacacacacacacacacacacacacacatacacacgctcaatggcagaagaatggctcagcatgtgacaacttctgtctctcaggatccttgccggtcacttttgcactgtcctctcagagtctaagatggattatggcccctgccattggaagaacagacttgcaagggttgacataagctgactacaacgaatctctaagaggcttcctcctggtgggtacaagggaaggtggctggatcggcccaccagattatctccaggccctatctctaagtgaggtcctcgagatgtccgggagccacttcctctgtaacaaacgggcgaggctcctcaggtgtaagataccagaagtcttcaggtcatcactctattgacagccacctcccccgtcatctctagtgattaaatctatttgtctggtgttgtggaagggctactcctgaggagtagcctctgagctatgcatggtgacgaagggggggaggagggagatacagggaaggaggagggggctcacagaaggtgtgccttggctagcgctcttgcaactctagacagcagcatagctacccccaggaagctcgctccataagaggaaaggacagtttcgcaagtgaggctggacctggggagctgcccgttggtccctggcacggcactgggcctgttaggaaatcagggagacattgtgtctcccgggcaggcgccacttctcacttgccccggtcgtgctcacttcaggcgctggctccagagccaggctggcagctgggccggtggctgggtgccctcttgccacaggcctgatgcccaggaagccacagctacagcttggaaagtatccctcttttgggtcccatggtaaggccagggggctgtgaggagccatatgagcaggaggtcagctgcgtactagttacgaagaattccagactctttcctccagaggttgagcgccaacgccctcttgtcctttcctgtcaagtagggattcctctacacacacacacacacacacacacacacacacacaagaaagccccacccaagatgcccagctcccaccctgacttgaaggggacggtctgcctctggttctgtaagtagcttagagctgtgaaggtgcacagagctaatgttttaatattgtatatttgaaccggcaaaggggtctggggtaggaaagagggtgtttgctatcttgggggctgctcaatcaaacaagatgtttcttagcggagacaacagccatgggaatgggtccaagggcaataatgaagtgtgtctagtccagatgggtgcacaagagatgacagcaggtaagccatgaggctgtgaataaggataggcacagtacagcccctgcttccttgggggtgaactaggcatgcctttctgaggaactgtcccattttgaaggctgtgggaatacagccagcatagaacggtgtgaagtcccttgaaggtttacggtcaccggagtgaactgtgggagctcacactgtccacaccaagagcacacctagcctcgcagcattcccactgcaccatggcccatttccaatcagtagtctacccaaatcatgcagactcgcccgccgcctaagatgttcctgagaggcagaggactggcctgcttgactcctcaaggtcttcttccgaccaagcagtccctctttcgacagtcgagttgctatgggaactataaccttgaatttcctggctctgaggctgtgaaaatcacaacctgaaccttccgttgaagtgggtttttcgattaatttcctgtttgattgtttactttagagagcggaaaatgcctttgcagcagctaggtccctttacccagaggctgtcacaccctccctgcaaggtcaagtccaggccttgggtgggtggagggactggggggggggggcggcaggggagagcaaagggccagggcagggaggaggcccagctaggggcaaaaggcagtctgaccccctatgctgccctgtttttctccttgttcttcccagggccccagcatggtgagacagacctaggagttcccactctggccctagctggggagcctggccacccacccagagccccaggcctggcccccagccagccttaaccctccctgactcagagaactattcggttctgagtcagacacaggccacagttactccattccttcagagggtaatgtgaggggtgatcgcctggaagggcccctgtgcatggctccccaagctaagctgccccataggcagctgggagaatgtctgccttggtgtcttttatttgctgcggccgagagcagtatgtgatatgtcagctgctgtaactccatcccaatttccctctccctctctctctctctttctctctctctctctctctctctctctctctctctctctctctctctctctcgtgtggggagggggcaaggcgaagggttggcaggcaggctcaggtaaggcccaagttccctcccctttgatgagaagcaccctgtgataggcattggcaacccaggccttcctccctgtctgcatattcaccctcagagagaggcaggagcctgcgcctgccttattagtggacatgctgaccccagggcagaggtgggattgccttgtgttctcggacctgtgaagtaaactctccaaagcagggcagtttgaagaagtactgttccgaatagcttccaaatgacgggtaaaacctgagagtatcccacgcaaaccaggtaagcagccactcacccttcccaggcctgactctgtgcagctcactgggcagcagtagctaaaccacattgactttgaagccagatgagatctaggttcacatcccacttacccactgttgcgttctctgggggaagttattttgtttctcgcctgtttcccctagcatgagaaatcattagagtgtctaacagggggagaagggtttaaaaatggacacaaagctcacctaaaacaagcaccgaaaatgtaattcaggtaaccgatcagacgcccaaaggtgctgtccagcattcaggagcctcctcttggggcggggtgtgggtggggagctacctccagtctctcctctccttaaagcaagatgggtagatgcttaggtaactcaaacctgaaaagacaagcagctcctagaaaggactagaataggctctacaggcaaagctaggaggctctgactgcagacatggttgacctttggtcctgggaatccatagttgcagggattgtgagcagaactcctttttattcgggccactgaccagagcttggctccccagaggagccactcaccaccggggctgtggcccctggctctggtgtctacagaaggattcggtgtctgctgagggcctcagatgatatttccagtccctggggccagctgtgggtgaagcactacccccatgtgacatttagtgaggtcactttgtagtggaggtttgcaagctctgcaagaaggaaactaatcagccctcaccaccgggcgggcgcctggtccgtggctagggtaagctgctcacctccattacagggctagcagccagcccttgggcacagactcagaccgaatgctagggctgaaacatgcacttccttgacatctgaccctggccaagctaccaagactcccgttaggctattagacaagtaacattagggaaaattcccctcttgggggtatccaagatgcaggcagcacagatattttcttagacaatgctaagaaattaacatgtgaacacgccgaaccccatagctttacccgcagtgtggacagcatgagcgtttacataagcaccttcacagcccctgcatccagagtgagagagcccttctcttaccctaggctgatctgtgtgcctaatccccctctctcctaactctgcccaatctggttcaatctgaaacttttaaactggttacatatccccctgcctccacacacattcctgtcaaaccaatgccaccctttttctcttgatgtcttctctcccataggcgaggtctgaagaaaaacgagagcgggggaagggcagttggaaagagagagagaaggaggaagaaacagatattggagaggcccccaagtaaaagcaagcaggagtatattctttctctgtgtaccttgggcttccttcacattctccaggccctggtgtctagcttctgcctgactctatcacgcactgatgtcatcatggcaaaggtcaccctctttcctaatcactaaatccactgtggtcattgttcatcgtacttgatctctccaagcatttgacctgctggccttctacttcctggaaaccttaccttccatgacgcttcttcctctagctccacttagatctctgactatcctccccttcctcccctgggactcatcctctcttatcccaggtcagaccttctcttctcattctgtgtattctccaggtcacctgattcacaccgatggccttgactgccccgggtactgagccaggtagccacttccccacggaactcgctcactcccgccttcccatactgttggtggctttgccacatatgcctctgattaagcttcaagcaggcttcctcgttctagtttattctccactctttgaaagaaaggatctttcttaaatgtaaatatcatctgctagtctcccatttaaaatctttcaggggatctgggcagtgatggcgcacgcctttaatcccagcacttgagaggcagaggcaggcagatttctgagtttgaggccagcctggtctacagagtgagttccaggacagtcagggctacatagagaaatgctgtcaaaaaaaaaaaatctttcagggctcttcagaatcttgagattaaacacaaaacaaaacaaaacaaaaaaaacaaaaacaaaaataaaacccagcgttgagcagcacagcatctaaatccagttggtatttgtccctagccttgtttgctatgctatgttcccctgcccctagtctgtgtacttcaggtatcttggcacactgttggcatactggccagtgcagtggtgaactcggcttgctctcattgccttagccttcagacattcttttttgcaaaaggcctggaatattctccactaccaccactattctccctctactctaaccccatatgccataagtctctctagtcttccctactatgttgtaagtcttatcattattttgtgtctacattgtgcttaccatatagggcattccttaaatattggggtatcagtggatgcatacttgtatggatggatggatggatgaattgatgaatgggtgggcggatgagtcaatgtgtagatagaagggtgagcgaatgggtaagtggatgaatgaataagcagatggatgagagtgcacagatgaatacagttgtcaccagcgaaatcaaagaacaggcaaaatcaatgccatgttgtaaaagcccaggctggcttttacagctaccagtcagcagaattaagaattacgagttccagctatcagactaaaaattagctagtccaggagaaatgaacagtgctctgtaagtcagaggatgctgacccgggactctgagctttgtctaactctgctcagactctctgtctgccttctgcaagccacttaactactgtggctcagtctctctgtctattaagtagagataacaatgcctgtggcctttgcctgtctccacaagagtgtcacgagggtacaaagtgtgttggtatctgcagggaagatatatgtttataaagatataagtataatcataataataacaccttgcgtgcgctcggctcgggctttgtgcttttcaaaagttctcgcctatatattatctcagttgactctcaaaacagggaggcagatattatccccattctcggataaggaaactgaggtgcagcgtcattaagtggcatgccctgggtgtctcttggtcagtggcagatcctgactgtcagcctgctgcacatttttgatgatagccttttcttggatagattatctgcctccctgaacagagagaagcaggcataattgacccctcttctggatgactcaaggtcattaccatgagtatcagttcctgtgttgtcttttagacttggctgtgatgcaggcccagagccagcagaggcataggatagacaggctctgacgactgtggcgtccccagtccaacaacctgtgatcctaggaccacgtgctagagctgtgccctatctctcgctctctcttctttctttccactgtcagtgtctgcgcccatctctgagatgtccaccccctccagttctttgatctcctttttgatctttctggccttcagcttcttccacgctttgacatttatctttctaggtcttggtccttccatatatacatccagccaatcagaacattctgatgggctctggtctccaacaaggtatcaagagtcacactctatagacttctttatcctctacctgccttgcttcctccagcctccccataacctgtgctactgacaacagagtcagagagagctctggctattgtatgtgaggcagctgggtctgttctccaagactgcaaagtgtgcctgtggagagccgcggtagtcaggaagggctggccagcatggtctcaggttgacaccctccccagtgagacacaaagctgtggtggtctccttgatcatcccaatcagcacatcaaggcaggcccacgtgtccttccctccgcaccttctttctctccctgctgggtggcatcccaaaagccagcctggttccatactgggcacgccttgggcagcttgcccatactccatggcccttcccaggggggggactcggggatgctctttctctagttgctgtcaggcctcccacagcctggctggagcacctcagcttcttctccctgagggaggatgtgaagggtgtgcccacaacaaggctccggcagagacaatagcccaggaatgcgttcgcttcctaacaaacactgtgtgggctcgcacaattgccttggattctcgtccaagaaacacatttcacagtgcaagggtgcgggtggcttgcctgccccagcccgcccacatctctctctatgccaaagacttggatgaggggtggcctgttccccacccagaccttcaccagagaacgtaggccatgcttggtgcagcccttcttaagagaagagactcagaaggacaatctagtcttccagagggttttgctctgattactctttttatttatttatttatttatttatagccagttatttttgttgtggtaaaatatacgtactataatacttagcattttaaatatacttttaggccattcacgttgctttatgatcaaccctaccgctacggagactttctatatttccccaattgaaaaacctgtctccactgactaagtcccaccccaccctgcagttcccatcagctaccatctgctttctgtctctatgaatgtgtctgtcctcagaacctcatgtaagtagactcaggctgcgtttgttcttttgtgcctggctcctctcagcagtgcgtgaagggtcactgaagtaaagacacatcatgactcctgaatattagtcagccccagtagatgggtcattcatttatcctttgcctccaatgagggacacctgggttgctctgcctttgattactgccaatcatatggccctgaagaagtatgcgagtgttatgtctgttcaagtggccactcccttttggagaccaatctttgagttcaaacaactgtctctcctgaaaaatcccaagtagaacacgcatgaatgagaaaatggcttggcccctcgatatacaaacagggttctcctaacccagctgtccttttgggaacctagactcagagaaatgggacacagagcaggcaatctgggtcaagatgggagaatggaaaggttctgtacttggaaggatgtctgggaaatccacaaagggaaagtccagtagcagatcctagggagccacagatgggtctgggtaacctgggaggatacacacaaaggggttccagggagggatccctcaatgaaggaggcagatgagcctcgtgctagctcatgaagcagaggtggagacttcccgactgtccacagagcggacaaggtacacagcagtcagaggaggaggtcaaaggaactattctacagtcaatgctaaagggttctaggggtccatgttcgacagagagggctgagtctgcatgtgtagggtgagcaggtcagagtccaatgccaggtgtcttcttccctgttgtttgaagcaagttcttcaagtgaaccctgggctcagtaattaggctagaccagtaggcccttgaaccccagtgatccccctgcctctgcctccccaaggctgagattacaagtgtggcccctgacacttgagatttttacacagttcctagagatccaacttgggtccccctgcttgccagacaagcactttaccaactgagccatctccccagcctttccttcctgtcctctccctacgcagcaccattgaagacaagagaatgaaaggcacagccctcaggagcttccttgagaaagcctagcaggcctgcacaacagggcctatcgcacgatgtgatttttggcttagcccagactttcccaacagccaagtaagagataaggttggaagagggaaccttcccccagctctacttgggagtcctgagccatcttccctgtcccaagtgagggattcaggccctgcagggcaggcgcagtggtactcgcctatggggagcctgggatagtacaagggcatggggaaagagcagaggaataaaggaaggaacatggacagacaacggagcctcatcctgtcagagaaggccaaaggaagataagcaggcattggatgggttaagtagggaggagttgttggcttggggtgtcagggcactctgccataggcctcagagctgcttgacactttccctgcgtcattaccagaagtggtaaagcacatgccacagcagccattgcgtctcaggtcctgggtctttgaggatttccccataatattgcttcatttgtcagaaaccaggtagactcttgtggggagatactacaggcccaaaggctgatctctggaccaacatgaccagcacaggtcagcatgtgctatgggaaagctgccataactctcccaccccttgccccagacacctcatcttctgcctgccttataatttctgtagcattttatttatttattggaatgtctacagtatgccttgtgggttttgtttcttttgaggtagactctcactatggagcccaaactggcctaaaatacaacatccccctgccacaggaagtcctgatattacaggtgtgcgccaccattcccagccagccatttttgatttaagaattctctcctgcaaactgtcccccacccccaagaagggctgcgggggaaggggttagggggacctgagggaaagtcacagcaggagtcccagagctatgcagagctcaccttattcgagcctagcctccatctgccctgtggagtaagtggaagcaggcatatctttccctccagcttcccccagcagggtcacccttcccggctttgggattcgctcccagagtgggctagatggaatgctggcctgcttcagggtgagatgccactcaacacttcccagaatgtgtttcctaatcttcaacatggtttcccaagtcacccagatgagagacctgtgtgtggctcttagagcaccccagggacacccccaggacacctccaagggaagtatcctgagctcttctcaggtattgacaatcctgggataagagtcaagaggaagccagaagcagacaccactggagggaagacacagctgtgtgctacagtctgctgtgcagacatagcaggaggtgtgcacgctactatctttctttcactctaatagaatgaagttgataatgggtatgttgtttaaagtgtgcaggtacatgctcagaagaaagttcttgccaagcagtggtggcgcacgcctttaatcccagcccttgggaggcagaggcaggcagatttctgagttggaggccagcctggtctacagagtgagtttcaggacagccagggctatacagagaaatcctgtctcgaataaaccaaaaaaagaaaaagaaaaagaaaaagaaagtcctgcaagtaacactgactgggtcagaggctttgaagctggtaatttcacaatgtgttcctagagcaataggtctcaaccttcctaatgctgaggccctttaacacagttcctcatgctgtggtgaccccaaccataaaattattttcattgctacttcgtaactgtcatttttgcgacttttgtgaattgtgatgtaaggatctgatattcgagatatctgatatctgataggtgagatagctgattcgatctctgtgagagggtcgtttaccaagggggttaagaacctctgccctagacggcaccggcgcaagctatgtgtttgcagaaacatccgttgcaattctgtgccatgtcctttctggcgagagaggtatgtgagatggtgccgctcacaccctcctctgttaccttccaaggcgagatatatatatatatctgaaggcagtggcccctcagcttggcccttcacttacctcctgtagacactgccagcttgacaggctatcttcctgcctcccaaattctctttctagcagattttattattattattattattaagccaggggctgaggacaaaggtagacaaatcaggccttggtcttataaaacttcacttgtgatggagggagaggacaacacacacaagaagagagagatgtcagggaccctagagagatgtcagtggaccatgagtgggcgcatcagtgacactttcctagggagagacctatctgaagagtcgtgggggggggggcctccatagggcgagatggtgaaatctgtggttatggggtggcctagaatctccagggacagaaatacaaagatcagaactagaactgtgatatgtgtgagacgtgcagttatataccgaaaatgctgactgcgagccaaatgtagcattataatctcagcactgggaaggctgggtaagaggatggctagttcgagaccaggctgcaccttgtatgaaactatgtctcaaatggggggaaaaaaacaagcaaaacattggtggtacacacttctaatcctaaaacttagacagtagagacaggggcaccaagaattcaaggtcatctttagttacatagcgaattcaaggccagcttgggctacatgaggcctctgtctcagacaaagaaaaaaaaagtgaatctcacattaaatgaattatgtctcaatttctaaagagagagattgggaagacagggtggataggtggaggaaaccttggtgggatgtgggcaaggcagcctggtcatgccttagttaataggcacttattagaacagaggagtcatagctggctttgggtttacagtgttgcacctgtggagaaccatgtgtgacggctcagctctttcccacaggcagatcttgacccctgacccagtgaagatgttggtcaccaatagcatcaaagctgggccaggaatgagcagaacagcggtccttctgaagggtctagcagccgtgagtgtacagcctgaccgttttcttctctgccctctcttccacagctcttgcagtcacaggatgtgaaggaagacgcagtcctctgctgttctatggaggtgagcggtgggctcagatggcctgatgtccagactcagtgccctcaggccttacagttgagggaaaccaaagccgttagggcagccactggtcctgggagctgtcagtggagcatgggtaggagcatccatgacacattgctagggagagacctatctaaagcgttgtgtgtgctcggggcctccatagggtgagatggtgagccaggcatgtagaggattgttctctaggggaatcattataggctggcactgtccacttctcagtttgaaggcctcctgctgtttagatcaggtgtgccatacggatgacttaagaggttaagaggttacaagtgacctgctgccctaaagatctcccttcatttccatggtatgcaactgggagaaggcgccaaatgactgagtgagtctcctacattggctcttgggaggcactactcctaatctcaaggtgtagccactgaacactgaggcttcttctggaatcttccttccaaggctggctgggttcttgggacagatccttgccctctacaaatagaccagaatcactcaggatagcacacagagagaagcccttctggcatggggacccagcctatctatgcaagtgagcttactgtacgctcaggtggcaaaggccacatcccaggagctctaagtcccaagaagctgcgcagcagtcttggttggatgagacgtcatgaggttcgtttgttgggcttcagctgggccgctgcatggcacttgcagagcttagagggaaagacaagtcagggtctggtccttcagatagcttcaaggctggcacaagctcaggggctgaggaatgtataagggaaatgtgcatatatccctggaaatcaggagagaggggtcagagtggctcacagatgtctgagaggggcattatgggaaaggtggagtctagaaaagcaggtaggacaagccagggtacagtggcaagaaatgtttagttatataggatcctgcaggagttgttagccagaagtccagaaagattagagtttctcctggccagcattcttttcttttcttttcttttcttttcttttcttttcttttcttttcttttcttttcttttctcttctcttctcttctcttctcttctcttctcttctctttctttccttttctttttcctctaaagattgaagggtctcctatttacctggctggcctacttcagtttgtatctctctgttagttatcatcacagatgtgggcagaggtcagttctggggcaagaggtatgtttgggcttagaaaggagacccatttcccctcatgtttcacacaggcacacataggtactaatcactggtctgtttccagagaaatacctggcagatgggaattaccacaaagatgcttcattgcccacgagagcagaccatggggtcaagccagagtctaagtgtagtcagagaaggcttccagcaggaggggaggtcctggggtagaaaacacaagagatgagttcctggtgagttgctgtcaggcctgggcagcaggcaatatcctggtaccggacatacctgctggcagatggttgttaaatctcacggttggctattcctgcgtggatctgcatatccctaggacaatttatatcttttttggtccttgcttccagcctacctagccaaggattgggagggaaatgaagggcgggaaggaggagtgcatattatggggtccgagtccccaccctgaccacacttttcatccacagctacaaagcacaggccggctgctagaggagcagctgccagagatgatgacggagctcctagccagcgcaagagataagatgctgtgcccctcagagtccatgctaacccggtccctgctcctggaggtcatcgagctccacgccaacagctggaaccctctgacgccccccatcacgcagtactacaacaggaccatccagaaactgacagcctgacagcccagccgagggggcctggcaggcagcccgtgggcagctggggccctagtgcacagggccagatggacaggcgcaaggacaggggtggccctggcgggaaagagaactgagcagggaggcaggtagccacggtggccggtctggagccagcggagaaggaggagattggatccctcagaagggctccccgtgcagccccacccccacccacccccaagcctgcgcatgtggcagctcacaccaagggaaagcatgtctctttgtcctggtggtcacccgtccttgctctcttctcctcggctccagtcctcnnnnnnnnnnnnnnnnnnnnnnnnnnnnnnnnnnnnnnnnnnnnnnnnnnnnnnnnnnnnnnnnnnnnnnnnnnnnnnnnnnnnnnnnnnnnnnnnnnnnnnnnnnnnnnnnnnnnnnnnnnnnnnnnnnnnnnnnnnnnnnnnnnnnnnnnnnnnnnnnnnnnnnnnnntctcctcactgtctacagctgcctctctgcctcccacacctctggccaccgcttgggtcagccaggactgctgaaggctgaaaaagtgggtcgagacagctctcattgttcccacgtgctgtcagccacggtcgccaactggcagcaggcagcgggcagcagatgtctgggaggacaaaggcaggcacggtccccaccagccgcccataattgatggcctttgtcagccccagcggagctggagagaggcttttttttctcctctaacctccgtgctccaccctccaaccctcggcctccagccccagggcccactgctccccctggcagagaagggagagccagggctcacagctcagcgtgaacccttttattttgtttttcaaaactcagtggctttgaagtctcttttcctcaatgaaaatgccctagattttgagatcacatcgttctcccctcaaggatcccctgattagtgggagactaagacctgccccccctccccaaagaatctagccactagcagcttgccagtagccagctagtaattggaaacttctgctccaatgggggtccccactggaatcctgtgttcctgggcccctgtcctgcagtgcctctgttctgtccactgctagcttccaaagggctggactgactgccttaggacctgccctggctcctgttactggcaaacggggccagaaacgaggctggcaaattacaaccaaatgcaggtcttgttccgagcaactgttgagggaagagcccactgctgactccacagatcttggagcctccttcatgatcccatgccgcatcccaggcaagacccacaagccctacctccaaggctgctggggagagggggaatcattgggtcctgactgggacggtttggtaggcagccagatagacaatgaagttcttcaggctagaaacaaagtcctggtttcttgggaggctctggtcccagggagcaaccacttctataaaggctagggaggaggaggaggccatcagagaggctggtcttactgggatgactggtggctcctccccctcatctctggggagctggaacccacactttgatgacaccccccccagaacatgtgtccaagcccatgcactggacctgggcatacctagaccatggtggaggctctaaaccagtggttctcaacctgtgggtcacgacccctgtaggggactcgaatgaccctttcacaagggtcacacatcagatatcctgtgtatccgatatttacctgacgattcataacggtagcaaaaattgacaattacggagtagcaacaaaaataattttgtggttggggttcaccactgcatgaggaagattaaagggttgcagcatcagggaggttgagaaccactgctctgtaggcctcctggttgaattcaggctgtctcgagtaaggatggtttctcctaactgtcccaagtctagaagagtagaaagcgatcagggtggaggagggagagttcccgagttctctgtggctgtctccaactcaagtgttcaggtcccaagatggggcctctgaagagggctgctgagaaaaaggaataggggtcacggccaccccagctttgatctctttccttttcttctcctccttcctagccttcttttctctgctgcttgctgccttgtctcccatcccagcccttaggctgagcctggagcccagggacacgataagccccacaggaggtgtggagggaagagcagggcaggtggagtagccagagaagacaccagggagatcctgctcctgtggacttgggcagcccaggctcacaggcacctgctccctgcatcctctggggccatggtgtgcttacatgggctgcttcccaggtgtgagcgtgtgagtgagtgagtgtgtgtgtgtgtgtgtgtgtgtgtgtgtgtgtgtgtgtgtgtgtgcatttgcatctgctaagaatgaagcaggaccttgaggaaggaagagactgatggtagggactcaagccacagtagagaggtctcctagactcctcattgggctcacagagtaggctccacacagtggcttccaaacactgtgtagaagagctagtgtcccctaaagaggcagagaccatggctttgtgggcaccatgggcctaattcagctccttcttgatgtcctgttggagggtcttgcttcaagagcatgccctcgtagggccttgaggaccagtgtgaagatgcaagatataaatatgtatacatatataaatatatttttaattacatgttgtgtcccagtggctccagacttgcagtttgcctagcgtattccattgtttgaaactacttcctggtccatcctgatatgacactttccagctgtctgtctgtctgtcttaaacgcagatctctgctactttttcaaacatggaaagaaaccctttttattattatcattattattattttattttttaaagagacaacagtaaagcctaaaatctaaaaggctgagcaccttcctgtgggggataactcaagcaggaagtaggggacttgcaggcacccacagaccctgactccccgggacagagcctctcctgctgcgggaggaacggcctatcaaagcctgcctctgatgaatgaacaggaggcaaagcctctctcaaacttgtgttgtcctgtctggccatgatgctctgatattgagcctttttaggctccgcccacctgtcaggacaagttggtccttgttttccactcaagtggcctgctggtcactgccctcctcatgaactggccgtattgcctaagctctgggaccacagctcctgtcgggctcttgaactcccctggacaaccaaccccttccaccaaccacggggaacctcttcccccacccccaaaaaaaccatcttcacctgggcatcgttcctcatccagtctgtaaacctttacagtttgcggatcatcttgtccatttgtgtacatgtaaatgttgacccaattggtatttattctaatttttattgtattttattttattctgtctgagggtgggggatgggaagtacaccactggtggcaaccagggcagagctgcagggatgcagcccaggaagcaagagaagcacctccctggggccactctagatggcagcctgtcagtacccacaccctgggctgttatctggaattggaagccggacagtgttcgtcatcccatacacacaggcctgcccgtggcatgatgtccctcagctgcctggcaccatgttgggaaacctctgactggctcttcgaggaggtgggttggagagactagaattctcctctgctcagggcactggccccagaagatctatctggagcctcactgagccagctgggagcctgacaacaggacctacctccctggagcagggtctggagattgccgccaaagctatgggccaaccctgctcgcgccgaccccttccatctacccgtatatcctgcttcccagctgaacccaaactacaagtgggtttaaaaaaaataaataaacgataccaaaaaaaaaaaaaaaaaaaccaaaagtatgctgagtctttcttctctgtgttgagctcagcagtggaatgctttccccaagcctcagctggtacaggcaggagtctccgaagagcccagcccaggctatgtgctgggtgaccagagaatcttcatctctcccctggctgctgtccagggcaagagcagactctagggcaggaggaggttgggaaagggctcatgcaagataagtgggcaaaggaatgagcctgctgtctctaaaagctgggctctgaggccaagtcagggtggtggaatttcctaaagaaaatggcttttgtgatagctttggcttgttacagatttacccagtccccagacctacccatagcatttggcaatgactgctaagaagcccaagactctggctggcaaagtctcggccacaagtattggccagtattggttcagtctcaggcagtcaaagtccgaaatcgagtccgaaatgagccccacgaggtgtacatgatagtgcaccctcgtttcagtttcttctgtggagaagcgggaacactacctcttagtaacaacaccttgtccttaggtgggcacagccttagcctgagagggcatgtggagattcagccattgcttggaactgagtctgattacctccacaaactgcctctggataaccaaaccgacacacaacttggatagaagaaagtgatgacatcattaaatggctgaaatctttgtcacgccaatatacaaaaattcaaaggagtaggtgcagcagcgagggggcaaaaggaaagtgtttgaagataactctcagggagaaacaagagtttatacctgaatccccacccaaagagacgattccgggtgagttagtccctcttcgaagggtatagattactgagtccccgtgcagcctgtcatccaaatatgagtgtttcatcccgcacttcaccctcatctctgctatatgagtcctccgtcttgtaaagagcaggctacatttgtcctagctctatagaaaggcaaaagaggaatgcttcatttgaaatgatcatctagagcatgccacagaccaaaaaaagccttttgagtaccaaaacaaaggttgggaacagaatgggagccaagagaagggatggctgggcgaggagacagtggttctgccccaggttcatgctctcagttggctcagtaagtaggcagacaaatggtatttgaggtgggctaagagtaagagttttaactttatggtgtgtgtgtatgagtttttgcctgcggagtatacgtgccacatgtgttcctggtacctgtgggagtcagaagaaggcatcagctcttctggaactggagttctggatggttgtgagccacatgtgtgtgctgggaactgaaccttggtcctttacaagagcaacaagtactcttaactgccaagccatctctccagcctcttgtttctgttttgttttgttttgttttttggtttttttttttttttgtcatctgtgcacacagatgtgtatctataggtgtgtgtaggtgtgtgggtgtgtgtaagtgttgcatacgtctgtgtatctacgtgtgtgtttgtgtgtgcttgctacattgcagtggggggagcttcgtgggggagcaggtaagtcactcttatccccctatgctgcagctcaagtctttttaaaagtctttatttattaaagataaaatcatctgggcagtggtggtgcacacctttagtcccagcacttgggaggcagaggcaggtggatttctgagttcgaggccagcctggtctacagagtgagttccaggacagccagggctacacagagaaaccctgtctccaaacaaacaaacaaacaaacaaacaagataagctaaaggatagttctgtggagtcttccctttacaaaggttctgggactccagctcaggttgccagggttacagcagcagcatcttttccccctgagctgtcttgccagccctgctctgactttgttatggtactgaatatggaacccaaggcctcatgaagccttagcactgagctggactccatgcgggctaagtggttctgactcccattttacagacaagccaagggccaacaacgcaagggccagatccagccaagtgccttttaccctagccctgaaagctggcggccatcattctgccccaccccgtgtcccctgcattggccagtctatcagacaaaggggcagccagctgcctgctaagaggggaacagagcagctctccaacttcgctcctgctgtggagaccagggcatctaggctttctgcatgggtgtgggaggaacctaccaaagtttgagttctttgtacagtgtgtcccgctgggtcccagtttgcaaagacagaagataagaaagtccctgtggggtgacacttcaagggccaggccaataaacaaattgctagaaactttctctaactgctgatacaggacacacccacacagtgtaacttccagaaccttgaccttagagaacctcttttctcacttaagggtagtgggtatgtcaagccttgattggggtgccagagggaaggggttgagagccactatctgcgccccttggagcacagcataatgttcaccatgaagaccagtgatgatcttgtagcattgacacccgtagtgggtcttgtagccatactccaagctgcggtgctgggtttgccactgtggctgacatgtggtggccagcacattcagagtgggggagggtccagtaagccacttgagttcaatagaatacataccctgattcaagattgtttatgacactcatgggccctaagcacttttactttcctaagcctgccactctcgtgcgtgtgtgtgtgtgtgtgtgtgtgtgtgtgtgtgtgtacactcgatttcatagttttcatagctatattagtatagagacatcaataattattaaacattttctttaacctaaacattaattaaaagaaatcctgttgtagaccccaagatactgtaacaaagcatcccagaactagatggcttatgaacaacaagcagattatttctggctgttctgaaagctggcagtctggggcagaggtgtcagcatggcaggctctaggagtgaggacccttctggctgcagactgccaacttctcgttgcatctatgcaggcagaaaaggggttcgcaaagagctggggtgggaggcagcttttgtaagggcactaactccattcctaaggggttcactctgtgacactcccccccccccacaaaggtacacctctgaatgttacccgactagggcttagaattccaacatgaatttagagctagtcatttgttcatagtagcatgctgctcagcctaggcaacctcagccctgtgtaggtatcttccccgagcaaggagtcctgcctttcctggctgcctatttgggttcagggtgactgagggcaaggagggggttaacagggcagctcacagaagcaacccagggtccccacacatgggtctccatctccattagtctctcatttactaagccctcctgtatcctgggcatggtcctgtgcgctcagtcttctgtaattctcaggagcatccagactatgggtatcattggctctggggatggatgactgcagccagaatcccacagctgccccgatgtagagagttctatgtgtggtgatctcagacaccaaactcctgcttctgaggccccttacctcccccacaccccagtgctttcctattttttcctatttctctctccttccccccctccccttgcattggagggctttagggaaatacattcagaaaatgagagctggcagcagagcgtcccttaccacagccatccacccacaagcctagctcaattgctgggtgaccagagcaaggttctgacagtggcatgcccatgatagagagccaatgcctggcttagggcctccggtaatactatagtgcttgcccaatttcattcccagactcagaagaaaggacagcccctccctatcaggtgacaagctagggggaacccccagaacccaggtctgcatgagaaaaatcagcatgctgcatgctgagaactgagaacaagcttctagaacaaccccatgtgtcgccaaaacatcacagagctggattttacagatgctcactcaaatgcacaaaaccttgtacagacttgcttctagatgagccaacggtggtaggctcccacagcagacactcacacctgcacaatgtcaacacaggccacacgggtgtcagtcccactaatcaccgactcaatttggagccacttcggtgaaatgtctaactcagtcttcctgcctcagcctcctaagtgctggggttccacgtgtgcaccgccgccgtgtctggttacaacatttcttcgttaaatgtaggactgtgcactcacagggactatcctgctgaactgggttgaaaggaggtccccagcctgcaattcctgtgctccagcagagtctctaagaactagcgggaggtatcatactcggagttctagaagcttcattcagccctcactattccgttatgatacaagacagccacccgctccaacccctcagttcccagggcacaacagaggctctggtcaggattctcggtgacccaacagaccgctcactcggggccatcaaggtaagtccaaggtgaactaaatgggtgactcaagggctcagggcccaatcagggccaggcacaccctccagagccgtctcagcctagaggaacatagacgtcagtgtcattctgaagaggctgacagaggacaggaaggtgacactataagtacaaaaaaaaaaataaaagtcacttgggtttttcctgggtaacttccgccatgacactcaaggtggtgaatgagcaagctgaaagtcccagggtctgtgtctgtttcactgtcagtgcctcgagggctgcggacggggcagagtttgggtaacactggctggcttgggctcacatttctccatgatgacaaagggacagagctcagcatatttgagtcacagtgactagtggagcagactttcgcttagtgccacctcctgtgccccgagtgccctccaagtcagggttacaagtcccctctggaccaaacagacagtactggcccagaagcaaacccggttcagggatacgaaccttcccacagcctactggagcaattaaaagggaaagaggtggtgagaaacatcaggggattagttaactctccaggtagggagcattttggttggggaagaggatccaggcccaagagtctgtaggttctgatcttcacaccaattagatctctccctcccaggcacctggcattgtgcactgggatctgatcatgcgactaacaaaccttaaactatgaagttttgtttgattggttggttgggtttttttgtttctgggtttgtgtgtgtgtgtgtgttgtttgttttgttttgtttttgttttgagacaggttttctctttgtagtccttcctgtcctggaattcagagtggccttgaactcagagattccccttgcctctgcctcccaagtactgggattaaagaaaggcatgtgccgccaccacccagccttagtttttggtttggtttgactggttgtttggttggttgattggttggttggtttggtttggggtttttggttgtttggttgtttggttgggttttttgattggttggttggttggtttggtttggcttggtttttgattggaatagctccatagaagtgttttgcaccctgatatctgacaccgcatatttcaccctttcttggggtgaaatggcccagggtcatttccaaaacatgaattaatagagttatagggttagccccagagattatcaaggtatgccttctgtgtgtttaattaattattgcacccatgtgccacacttttgcctccgctctcatcctaaagctcttcttaaccactgtcactatcattgttgtggcctgagaaactaagccacttgtcaggactgtttgtctaggagcacacaggccttcactgagggctctggagcattcttagcaaaggttttgcagcaaaggtggacatttctcatcatagtggtggtcatttgaagcaaggtctcactcttagcccatgctgtcctcaaatgccaggtttttctgactcaccttccccaa

SEQ ID NO: 120 - DNA, 2068 bp, Mus musculus
atggagaactcctcagcagcttcagcctcctctgaggcaggaagcagccgctcccaggagatcgaggagctggagcgcttcattgacagctacgtgctggagtaccaggtgcaggggctgctgaccgacaagacagagggtgacggcgagagccagaggacacagtcccatatctcccagtggacggctgactgcagagagcagctggatggtagctgttccttctccagagggcgagccccgccacagcagaatggcaacaaggacaactccctggacatgctgggcacagatatctgggccgccaatacctttgattccttcagtggtgccacctgggacctgcagcctgaaaagctggacttcacccagttccatcggaaggtccgccacacacccaagcagcccctgccacacatcgacagagaagggtgtggaaagggaaagctggaagatggagatggtatcagcctgaatgacattgagaaggtcctcccgacctggcagggctaccatccgatgccccacgaagcagagattgcacataccaagaagttgttccgaaggaggagaaatgaccgaagacggcagcaaagacctccaggagggaacaagccccaacagcatggtgaccatcagccaggcagtgccaaacacaacagggaccaccagaaatcttaccaggggggctcagggccccacccctcggggaggcccacacaccatggctacagccagaaccgacgctggcatcacggcaacatgaaacatccaccgggagacaagggagaagcgggcagccaccgcaacgccaaagagaccgtgaccgttgagaaccccaaacttgaagacggcccaggggacaccggacacagtggccttgagcccccctgcagccctgacactctgaccccagcagcttccgagagaccaacccctcagctgtcaggggggccggaggctgagataaagcataaagacactgttcttcctgagcgtctcagggagcggcccaaaatcaccctgctccagtcttccaaagacaggctgaggcgaaggctgaaggaaaaggaccgggacgaagtggcagtagagacaagcagccctcagccaagcaagatggacaggctgatggaaatccttaacagcatgagaaataacagcagcgacgtggatgccaagctcacctccttcatggaggaggcgcagaactccaccaactctgaggagatgctgggggagatcgtgcggaccatctaccagaaggccgtgtcagaccgcagcttcgccttcacggccgccaagctctgcgacaagatggccctcttcatggtcgaggggaccaagttccggagcctgctcctcaacatgctccagaaggacttcactgtgcgggaggagctgcagcaacaggatgtggagcgctggctgggcttcatcaccttcctgtgtgaggtgttcggcaccatgcggagcagcactggcgagcccttccgagtgctggtgtgccccatctacacgtgcctccgggagctcttgcagtcacaggatgtgaaggaagacgcagtcctctgctgttctatggagctacaaagcacaggccggctgctagaggagcagctgccagagatgatgacggagctcctagccagcgcaagagataagatgctgtgcccctcagagtccatgctaacccggtccctgctcctggaggtcatcgagctccacgccaacagctggaaccctctgacgccccccatcacgcagtactacaacaggaccatccagaaactgacagcctgacagcccagccgagggggcctggcaggcagcccgtgggcagctggggccctagtgcacagggccagatggacaggcgcaaggacaggggtggccctggcgggaaagagaactgagcagggaggcaggtagccacggtggccggtctggagccagcggagaaggaggagattggatccctcagaagggctccccgtgcagccccacccccacccacccccaagcctgcgcatgtggcagctcacaccaagggaaagcatgtctcttt

SEQ ID NO: 121 - protein, 594 aa, Mus musculus
MENSSAASASSEAGSSRSQEIEELERFIDSYVLEYQVQGLLTDKTEGDGESQRTQSHQWTADCREQLDGSCSFSRGRAPPQQNGNKDNSLDMLGTDIWAANTFDSFSGATWDLQPEKLDFTQFHRKVRHTPKQPLPHIDREGCGKGKLEDGDGISLNDIEKVLPTWQGYHPMFAEIAHTKKLFRRRRNDRRRQQRPPGGNKPQQHGDHQPGSAKHNRDHQKSYQGGSGPHPSGRPTHHGYSQNRRWHHGNMKHPPGDKGEAGSHRNAKETVTVENPKLEDGPGDTGHSGLEPPCSPDTLTPAASPTPQLSGGPEAEIKHKDTVLPERLRERPKITLLQSSKDRLRRRLKEKDRDEVAVETSSPQPSKMDRLMEILNSMRNNSSDVDAKLTSFMEEAQNSTNSEEMLGEIVRTIYQKAVSDRSFAFTAAKLCDKMALFMVEGTKFRSLLLNMLQKDFTVREELQQQDVERWLGFITFLCEVFGTMRSSTGEPFRVLVCPIYTCLRELLQSQDVKEDAVLCCSMELQSTGRLLEEQLPEMMTELLASARDKMLCPSESMLTRSLLLEVIELHANSWNPLTPPITQYYNRTIQKLTA

SEQ ID NO: 122 - DNA, 348101 bp, Homo sapiens
  misc_feature (1)...(348101): n = A,T,C or G
aacaagcaaacaaataaatggaaaataacaagtattggcaaggaagcagagcaattggaacactcgtgcactgttgtgggaatgtaagatggtgtagccactatggaaaacagtatggtagttcctcaaaaaactaaaagtagaattaccatataatccagcaatttcccttctgggtatatattcaaaagaaatgaaagcgaggactcaaaggggtatttgtagacccacgtttgtaacagcatgattcacaacagtcaaaaagtggaagtgacccaagtgtccatccatgcacaagtgggtaatcaaaacgtggtatatacatgcaatggaatattattcagccttaaaaagaaatgaaattctgacacgtgctacaacagggaataaccttgagggcattatgctaagtgatgtaagccagtcacaaaaggacaaatactgtatgattccacttacatgaggcacttagattagccaaattcatattaacaaaatgtagactagtggtttctaggagctggcgacagaagagaatggagaattgtgttttggtgagcacatagttttagttttgcaagatgaagagttttgttgattaatgctagtgatggaagcataacagtgtgaatttactaatgccaattttaagtgtgcagtaagcatacaattaaatgtttaagatggtacattttatgtcatgtgtattttaccattttttttaataaaaagatttttactattttaaaattataaaataaccaccatgattaggagttttctatacctaggaaatgggaacacatccagtggtagaagattgtagggaatggagaagtgacagtgtggccaacccagaatgctctttagcagaactgaatgcctgtcatagctgacagatgagccactcagaacatgcttgcatttgtcaatgatccctccagctgactccacagtcgactggtttcacaaagcataacactggttgtgatttgtgtctgggtaaccacagcttccagagatgggccctgtccaagaagctggtattcaaaaattacaactcaattgataggagaagagttcactggtactggcttagtaattaaattgcgaggtgattattagtctgctcaggcaaaaagatcacatgtgagtactttaagtagcctaagactaaaaaactcctcccagaaaaaaaaaaaacaaacctgtaactaaattcataccattttctgccaattatagatgccctccagtgactttaaggttgccacagcaacatgcccactgaaaggttgtcttagtccattttgtgcttctataacagaatacctgagactgggtaatttataaagagaagatatgtatttcttacctttctggaggctgaaagtctaaggtataggggcccacatcttgcaaggaccttcttgctgtgtcatcccatagtggaaggtggaaggacaagacagcacacatgagcaagagatcaaactcacagactgaagccctttcataatcagcattaatccattatggggtggagccatcatgacctaaacacctcctagtaggccctgccccccaacgctgttgcattagggattaagttcccaacacatgctttttgttaaaaagaaatgtgttaaataatgcattgggacatattcactatagcatagggcatgattgctaagtcctgaaatatatggatatagcaaagagagaatgtttcacatcttatctctgtgtcaagccaaaattttcttctaggggtaggacaggtgaactgtcaccaggcagctctcctctcttctgtggcgcaatctgaggtcccaagctggcttgccacctctgccactgccccacagggagcacagcagcccggcatttcccctacactgctcccttcccctgggtggtctcccagtccacataagctaataggcatcctcccttgtttttctgaaaacctcctctgccacctctcccaagcagggttccctgaccaagtggcagcttggtgctttctagagcagatcccattcaatcacctagctctgcacaaaataaattcaaaggcttcacacaccctttgcctttgttcaagtcccagacttgctgaaaatcagctgactcctgtgaaggtgataatggggagtaatgctgtgaaccacactgatactgaagacacattccagaaagctgctgatgaggcaaaatttggtctatcaggtctgacattgcatgtaccagacgtgctgctacttaaagaaatgatggctacttcttttgtaaaagggataaccatcttacaaagtgtcttttgtgtaaatttctatttttatatattagtaggtacattttagaatttaaaaagctgtcttgagtcatttctggaaagagtggagtataaacaaatctgataattttgccaaaacggaaaaagaggtggggtgagggtagtggatctgcatgtgagaaagggacagaatgacagctcatgaagaaccatgagaacagatcctgattctgcaagttctactgaaccctcagaggccctgctgaagatgaggatgaggattactgggattagggcacaagccagtgttggatctcacagtctgggtcaggctgggagtggctcccacagtctgggccatactctactgtctacccgcattataactgaaaaacaaaatctaatctcaccctcttgagtcatagaataaagtcctaattggtcaaaacttttgttcctggtcccacacagcctatcacttgggtaacagcaaaaataataacaataataaccaaaaaataaaacctggcgttactataagtccttactatgtgtgaaatgccttgtatacatcatctcctttaagccttataatgacttactgagatatgttctattatttctctcttttgtagaggaaatggaagcttagagttgcccaaggtcaagtggtgataaaaggggaaggcaggatgcaaatcctggtgtctgcctcctgagtccagtcttgaaccaatgacacacaactaactttctggacttcgtgcctcctcctccccattgctcagcccctccccgatgtgagttcccacttctaagctcctgcctgcctatcactgggaaagccccctttccagccctggtcccatcctatcacactcatgcctggctcggttccacttctcccttgaatgtctctctgctgctctagcttacaagggttgccttttccctgaacaatcactctgtctatattacacatatggcacaccttggattttaatattttactgccatttctgtttaaaatgtgtatgtcatctgaactaaactgtgaggttctgtaagcctaaattaatgcccacttttgtgtgtgctggtcattcatattcaactttgaacaaatgcgttatatataataaatactagggtataaaggatcatttaaataattttttaatgttatctataaagagtttttaataacagaaaatatgtgtttaattttattacatgagaaaagcaacatgcaaacatgcataagcaatgccatctcagctattataattccacatgataaatcacgtgtagaaaatttgaaacataaaatatacagggtaataaatagggcaagaaaggcatggaacctcattcagatttagtgactgcatcttcattatttcctgcaatcattttcttattaacaaattagagaatgtgacaaacactcaaaatccagaatgtagtatgtggaccccctactatgtatgtctcaaaatgagccaccagcatgtctgaagaaaatattgtgatatttactgaaatttatttttatgtcaaaaataggcaaaaagagtaaacttccctaagcgcaaaggatcttttgaatcattaacataaatgaacacatacacatctctgaagtctcaatttaaaagaaagaacactttattataaatgcaccattgaggaagaatgatgtttccaaaatttcctgcagctggagtacaggtgctcaccagggactcagagaaggtagatcctaatgtcttgagatgaggggcgtagttaactcactggctctgaggcccacagctctgggtagaccaccacctacccactggctgcgtgccccttggtaagctacttcaccccttccggtctcagtttgttcccctgtaaaagttgctttgccaactaagtgagacaaagcacacaaaaaaagtttcgcttgttgctctgtaaatagtaatagctcaattaatatagtagctattgttctttgaaaggggacttagagatcctggaaggctcaagggcaattattttgcagatatttcagaacaagacttgagcagacaggatttataaactgactgaagagggagacacctgggatagaaaacggaagggcatcttcagcagggggacagtcccagctagagggatcatattggcctaactcctctctctgcacttcctgtctttcaggctgttctagatgtggctcttcaaactacaaagatcggaagtcactcaacctagcgcaaattaaaggggattactacaagaatatggagtgtattaggctgttcttgcattgctataaagaaatatctaaggctaagtgatttataagaaaagaggtttaattggcttatgattctgcaggatgtacaggaagcataacactgacatctgcttctggggaggcctcaggaagttttactcatggtgcaaggtgaaatgagagctttcaagtaacatggtgaaaggagaagcgagagagagagagagagagagagagacagaggtggggaggtgccacatacttttgaatgaccagatctcacatgaactcactcactattgtgaagatagcaccaacggaatggtgctaaaccattcatgagaaatccacctccatgatccaaccacgtcccaccaggccccacctccaacattgaggattacaattccacatgagattcagagggaacacagatccaaatgatatcgcagaggtatatggagtccaagagaggcatagtgagggagaactgaaaaggtaaggaactgaggctactctaaacatgtctctttccctctccctcctctttcccccctccactcacttcttctgcttacttatcttgcactcgacccacctaaaacacaagccttgacctgagcagccatcaccaatgagcagagagaggtttctcagcctcttacttcagattcttacaagaggaattctgattggctcagttcctctgatggagccacatccactcaagtccagcctagcccaagatcccatagatcgggtgtatacctgtggtgtgatcagcactgcctgcccctcccatttttttagagtgtagactggcaaacaaggaaacttgtctcttgcagagatgtggggtgtatctttgtccaggccttcaccatgaacaaggctgtggtgctcacgccaccgacttaggaggtctgaccttgaactctgggagacttgaggaatgtctgatgactcacaggctgacattgaatcagtccatgtccttaaatcttgcaaaaggaaatctgcttattttatattccctcatggacttcagggctttgtttaacaaatattacaaacctttcctgctctgctggaattaaacagcttaaaattcatccttttggctacttaattttcttgcttcttttgccagtgagattataacattcttgaagggagaatttcaggtgtggtgaagatcttagagatcattgaggccaaccttctcattttacaggtgtggaaactgaggcccagagacaggaaacgtcacacagcaggagaggggcaggtgggacccgggatcccgtttcacacactgtgttccccagagtaccttgccatgtcttaggcacagcattgtcccaacaaatattcaattgctttatttcatattctgcttttgcttttctcaagctcattgttctctattcacatcccttctctaccaccgacttcaatcttaggggatcactttgcatgtgcctttcaggtgttggtctttggggttgtgtagtggaaggtgagatgaggcatgggtgaaatttcacctggttctatcaagctgttatctctccaggccaacaccacggtaacagagcgtagacactagactaccaacttccttccttctgcactgtcagtggcctccaaactgcatgatgaagccactctctagctcccacagtaagtcactagttctgcaatgcctcctgggccaacaccgcataacaggaattttggccactgctgaccttctcccagtgggaagtaacaagtggatgtagccccaccttcctcccagaagccttctctgatccttgtagccgactgggaactcttagttcatttgacatcactctcacacagtggagcgcttcattcattttcctgttatctgctgggcatcagcctggtctcagctcctgaaggtaggtagcttctctcccccagcacctacctaggctcccaccaggccttcagtcaatgtgtggactgaccagtaacttttccctggaacagctatggctacgggggtgagtggagagaagtcatggcaagaaaggagaactagtactttttgctattatcttaggcaagtgtgaatgaggagaagcaactccttaaaacaaacagaaacattctgacttttcatttctaggcagacagggaaactcctggccactcaaaatcggtcacaattaaaccaatgctagcatcatttgcttcaggaatctccagttccttcactctgcacccattagctcttccgacccaagcctgcaggttgggcatgaaatcaatcccagagcagagaaggaacaacagacaacgggccacataagccccaggcctcccacctgggggaactctggtctgaggcatctacaaggccttcccctcaaagatccccattccagcctgaaatgcccatcatcagaggccactgaagagagcgctcaataagaagacaaaagtgtcagagttagaggagagaatcagaagaatatcttatatgttaatgacagtttattagactggaggtagagcccagagccaggcactgaggatgtggaaaacaggagggaagtttgggtgggcaggcagcagcaatgcaaagccccaggcactgcccagaggaggcagcattaggtggggcagcagggtagggagcagaggagcatgaagaactttagctgatgtgggttaagagagctaggccaggagcaggggaaggttagaattgggtccaggttccttgaagacaaacctaactgatttcacatattaagatgtgtcaccctcaggaatccttcctgcactactagctctgctggtgtgagtctgcagaaagaaaaattcagggatcatttttgagggccagaaagactcaggacaagaaagggcatcagccatctttgagcactttccatgtgacacagtcagcataaacccacgatcaccactggttctcacaaggccaagaaaagttgttgagtaagtggcccaaggtcatcccttatgaatgttaagtaagctgcccaaggtcacagagccaggacgtatcatgcctgggattcaaacccaggggtcacactgacaccagagcctgtggttcccactgccccctcaccctaggtgcataccccaaacggaggtgtgtgctctccgtggaagcttcacgttccacatgttgctcaacctctagcctctcctcacctctgagggtgcgatttaagcaaaagcaaagccaaaacccagacaattttattcttatttcctttgcaggtggcatgcctgtcacacaatatgtaaaaaccaacaatgacaacagggtaagtaaatgggaatttgctgaatgtgtatattccagtattattatataatattttgtaaacccaggaaattgtccagatgttaaagcatacaaataactcactgctgagccaatgaggcataaatgctaagagggacaaaccaacgggaagagtcaggtgtgcttaaacctgttgctttggagtggacgacggttgcctgccacccagacaactggcctctagtacccactctgtaccgaatcatggctgggcatgagttgcttaactctctgggcctgttgcctccctcctgaagggagggaatgacagccaccatggcctttggtacaagaatcaaatgagttgttctataggatgtgaatgtctatgctgttctgtgtctcaagcccgggagacaagttctccacacaaaacaaaatcccacccatccttcaaggcccatgccactctccatggctaattttttaaattttttgtagagaaggaatcatgctatgttgcccaggctggtcttgagctcctcaggctccaaaactgctgggattgtaggcctgggacctttcgaattagctctcttctctcatctgaagcctttgtaccctttaaccttaatcaggtgcttatcctttcctctctctttgttaaaaatcttagaaattcttgccgggcacggtggctcaagcctgtaattacagcactttaggaagctcaggtggtggatcacgaggtcaggagatggagaccatcctggctaacacagtgaaaccccatctctactaaaaatccaaaaaaaaaaaaaaaaaaaaaaaattggccaggtgtggtggcgggcgcctgaagtcccagctacttgggaggctgaggcaggagaatggcatgaaccagggaggcagagcttgcagtgagccaagatcacgccactgcactccagccagggcaacaaagagagactcagtctccaaaaaaaaaaaaaaagaaaaaaaaacttagaaattctttgctcaagtatcacttcctccaggaagtcttcctgaccctctcccagaccccacccaccctccatccagttggctgctccaggttgtgtggtggggggaatttcacagcactttgtgttaagcgctgacttatcccttgtataatactttcattgactgtagtccctaatactggactgagctccttgagcgcagagactgtgagtcttacctgttttggcattcctagacacacctggtctatggaaagtgctcactaaatgtgaatataaactaatgaataaatgggtttctacagcagtttatactgcatcacacagttcctctaatgaatttctagcccccttccctgttggggcatacagtattttattcagtatttctcctgaaggcctctctgtgccaagctcagttttaaccaaaacattggtgatctggttaagtcattactgaattatccactacgttgaattctcccaaccaccccgtcccagcccttagcttggccgaaggaaaattaattggttgcaaagtgcgtatctaattacaacagccagcccccgacacagagatgctcaaatgttaattataacatatgcatctcaataaccgacggtggcatttagtgcagcattaatcacgccacttgggccccccagtgcatacacaaagctccttttcatctgccattagcacagactttgcactttcggcacggacgttctcatccttaaagcctttcggactctaaaaccaacgtttccctgtaagcctggactgcgcctaagcccccagttctcccaccgcagaggcccccacccagggctgcgccagcgccgtggggtcgctgggcggcgggttttggcgtcgctagactgggctgtcttggcagctaaggcgacatcccgagcgtcctggggccaccctgctctccagggcccgccatcctggaaaagaaaggcgaactacattacccagcaggcctccagccgccctctttcctttcaagtctttgcacgtggccggaggggagggcggggcctgaacgtcactctcctacattctctttccctgtgtcagatcagggatcattttttttccttcctctactccctcccccctacccgcccctccctccctgtttcccttccctccctccctcccctctctgctgggtctgtgcgctggggcgcccgatcccctccgcagctgggacgctccgaactcgaggcaggagtcggctctccggagcctcgtccctcccttccccttccctgcccccttcccccacccccgactcgggcttggcgcggcggccagaggaaccccgaggtgagcatctcctcgcccgtcctcctcttatagtcatctcagcttgctgatcgattcggggacccgggaggagggctgcgtgacgtgggcgtgcttatagataaatccgggaaaaccgccccaaacaatcagcccccttccccccatccctgctcctgggccagcggggtgtccgcacccatctaccatcccctcctccccctcggtggggaactgcactccacagtgtcgccccctccctgggtttgtcccattccctgccgggttccccgccccgcggggtgtcgtggccctggagctccggcgccaaggggggctcttgggggacgcacggctggagcccggctcgctttggagctgcgcggtgtagccgctgtcatgtgccgggttccgacctgggaggaggaaaagagcgagcgcgattcctctcccttttgttttgaagcccgcatttgctgcatcgagcagttggtttagtatcagccaaacttgcagctgttcagaccgcgctccgccgaggtagggagcccgtctcggggtggcgtttgggggccgggggctgcggcactcggggctgcgggagggaccccgagagtgtgtcgccacgccgcccctcccttccccggtgactgattgtgtctgtggcagcgggcgtgtgtgagtgtgcgcgcccgtccccgcgggctcggggatgtctgtggatggctgtcgtctagacagggcgcagccccctccctgcgtccccggtgagcccgcgggccgcggggggagcgggggatgggagcagaggaagaaaccaaatcggtggacccgttgcggtctcccctttggttattcccaacggttgtggttctgttggctttttttattattcctgtcgctgcggtgcaatcgggcctggggaatagatacgcccggcggagaggggttcacttgacaggctctgaaaagccacctctgggtggcgagtgacccgagaggccgtggggtgggctccggctcgggttcatcaggacgacgagcaggtaactgtcccgggcgccggtcatgggggagggcgggcgggggggcgatggcttgggctgcggcgaaggtctggggcctcggagggccgcgtgccggtgcctggatgtggccggagggggcgtccgggacaccgcgcgcctgagccgagtgtttctctattgatggtaaaagacaatcgggaggggggtggtccgagcccgttatctgggcggcgttggctctgtttggttccgcggagttttcagggttggggctggggggtgtgagcaccgcggggtgtgcggcgtgtagaggggagggctgactggcggcgccgcgtgcgtctccaccccgaggagtgaggcgtcgcctcccccgcccggctgtttgtgtgtacacacggctccggtgtgtgtggggggcggggaccgcagaccgcggcgtagtggggacaagcgtgggccccgatcctccgcgcgacctgtcccgccagccccctccttgtctaagtcggggtcgtgtgtccccgcgcgcgcgcgcccgagttacttggagaggggaccgtgcggctgtgggccggggaagaccgtagggtcgcgtgtgctggtcttcggtgcaggagtcccaggtccgctgtgcggccggagtcacacagcccctccctccgcgtccgcgacgccccgtgacccggcagactgggggtccacccggcggcgcggggggttggtttggctgcgccgcccccagtccacgctggggtgaccccgcaccgaggcgttctatgggtgtgcgtgcccgcgctcgccgccgctgccttcgcagaccggggagagagtcagcgactgccaaccgcagccccggctcttcagtctggggacagtgggagcccaagcccagcgcgccccagcccggcccaggccgccgcccgcccggcgctgtgtctctgcggcccgaggattatcccccagtccaggggcccgcgcgaccaaggaggaagccgctggagccgccggctcggccgcggctagagcctccgtagggcgaaagtgacacagcgcgagagagcgccgccgctgctggagccagggccgagaggaaggagccgcccagagcgcagggaggggccgccggctgtccgttcccagttcctcctgcccagggcccgatctgggctgaaaacctcaggaatccaggctcctagcaggctcgggctgcgcgaggagatggcctggctttcaagaaaacccaattatacgtgaacagaatgcaccgaacagacgctagaggatggccaggacacgctcaggttgtctggggaaactcctgagtgtttgacacaggattcgatttacacacagatcacctcatctgtgtcaagtatctgtcctggataatggatgctcagaggcagcaattttgtaacacattctagggcacagtgtcatcagtgattaacagcttgctagaataataatatgtttgtatgaccttacagggcaggttttcttcccccagaacctcccccctcccccgccagatatcatagcatttattaagagggtcctgtgaggtaggagagtattagccccattttacggatgaacacactgaggctcaaaaatgtggcttgcataaggcctctgggtgggggaagggccacattcccccttttctcagcttatggcatttaattaatagtggccactttttttctgagtatggattcttgacacctcaggaaatactgaagctaaaaaatagagtatattatgctgacacatattctttctcaaaacactcttgatttgttaaccattcctaatgagagcagccactaaagaacggaagtctgcattgctgttattaccacgcatttaataatttgctgttggtgaatggatagcagctgtgatacatccagtttctaccagaatcatatgtgcatataataaatgtatatggtatgcctgttcatgtaacacttacctgtgtttgtatggctgtgttcattgagtctttattgaattcaaggagcaaagaacttatacatgcctgcatggatttctcagaattcatgcatgtgaaggctgtcagacagcctggagggttattaagtttagccaactaatcaattaattaaccattcactcaatatgtactgggcacctacatgtttgtgtatctagaagtgcatacaaagaaaacttaacaaatgttaattaagtccagcaaatgtttatgaagcaccagcctcacttaggccagatactctgcttctctacaaagatagtagagcagagatagttaagttgcaatgcaataacacagcctacaggagggaacaaatcataaatattttagagcagtcaccctggaacttagtttcacatatgttggtttcaaggggcccaagatgccagttcttattctagagcaaatgcagaaggaagcgatggggaaaaaacaccttgatagccttgttaccctgaacttcaggctgtttgcaacctcccgggagggcccagaggtatgttcttctgtggaagttaggcagctgatggaaattaccctgaagccaaccaacaggtttctggcgacacggagctaaggagatgttctccgtggtcccgccccagctcagatgtgctgtgactcagggacaggctgtggctttggtcaaggtctcactcaggccctgcctgggtgtaggagtttctgccttacaggtctgtgtaggtgtgttaatacaagtctgctttttatctaatcccaaactcaccgtctggtcccagatattgtcctctaatttcatttctgttttgggctccattgcccttgttttaaggttatgttgtttgcagctcaggtcatgaaggaggaggcaggagatgggtggttaggttggagagagaatcctgagcccagatagagaacaggaggtacaaacatgcaggcaaattgcagtttctgagaattctccacacgtggtggcatttctgcataacttacctgataacacagccccatttgatgtccttggcttggcagggggagggggcgtctacctctgggcctcactgctgactcaccggcaccctgagctcagctgcttcctttcaggtttgggttttcttttgcccctgcctcccgctgtgtgcggtttaatttagaaccttgctataatggtggccttctccctgtgttagcaccgtgctctcagcatgcctctgactttggaattaaggccagagctgtggttcacaacggggtgagaacagacacatccttggatctccggcacccagagctggggaggactttgaagatgatctgatcttcacgtgaagacctgaagcctagggaagtggaatgacttgcctaaggtcatggtgagcccttagcagagtgggtaaaaaatcctggaatttgagatttcatccaatcttctttctatgtaccgtaatgctttctggaaaaaagttaggttcttcccaaagagtgagaactctttatcttcttctctcctgtcttctggttctgggaagggctctgaaattcatttgacttctctttccttcacaactggcccttcctgccttatcttcatctttggcattcatgagcaaatgaaggtctgtatttgggaaatatagggtgtcttggtgtcctacagtgctcttaagcttggtctgtggctttctggccctgaggcagggtcctcaggaaccttttggaagtgtttgcaaagctgggatgcgtgtgtacttttctaggaagagaatctacagatttcatttgattctcaactgactcaagtaaggacaaaactactggtagggagaaggacagaaaggttggatagtggttggttgacactggggctactttaatacgctgcacttgatttggctttacagtttgcaaactatttcacacaaattatcccatctgccttttataataggtggttatcgttatcagcctgtgaggcagttgttgttatacccattttgcagagcaggaagctgagccttcatggttagtggcatgcccaagtcacgagtaagcagtagagcagggatatgaaccctgacttcagacttcaggtccagtgctcagggctgaggtggcttgctgtctgacatcattatgatgaacagaaagccttgaacttcccagagcttcttaatgcctactgttcactcatattcggccacagagccagacccaaatgctcacttacccaaggggtaggggagataaagtatgggaggcagttaccatagcaacgatctgtagagtggagccagtttgggatggtttcatggatgaggtgaatttgggagtaggcctgggtaatggtggaggaggttttaggctggggcaatggcccaaaaatggttagggggcaactaggtgcttggggtgggtagaacagacctaagaggtttacttgatcatcctgcagtcggtgcgagcttcacagtagttgtcgggctgcttttctatgcctgtctttgtgctaggccctggggctatgacagtgaacaggtacagccccctgccttcaagcagccagctttctagtgggagagacagatgcataaacagttccattcaacgtcatgtgggaagtctaggtagagagaagcccaaggcccttacagcggcacagacaaggggcagccacctgctccggcctcagatgtcagggagggcttcctaaaggagacggctcaggagctgaatcttaatggatgaaaaggaactggccaggaaaggagatgggagacgggcattcagggagaaggcatggcgtgcgcagggtgtggaggcatgaggctgcctgggtgtaggaaggaaccgcaagcagtgaggtcaaatgcaaaggcggagatgcagacagcgctcagagtggaggagctttgtaagcctggtttcagaccttggcttttagcctgcaggtaaggcatagaggaaggactttaatcagagaggtgtacagccttgcttggatcggaagggaacaggactgggagccaggcggccatgggactggtgaggcagtaacaggctctccacggcatccaggtcatagggggtgagacctggaacaagggccatgcatctaaggatggaccaaaggtcatacattaaaattagttgggagtaaagtccgcagtgattacttagacttgggggataagggaatcatctcagtggctcccaggtttgtggcctcactgactagatggacggcagctcttaactcaggtgcgaacttctggttgctggagcagggtctgctggggttggggtgggagggaagatcatggtgagttcagtgctccggtattgaattggaattgctggtaggatagtggggtggtgctgccctacagacaatgcactgtgcaagctagaggctgcagaagtgtgtgcccaagctgagccctgggagcggggaagcattggccactgagcgtaaccacggtgagggctgctgtagacaatgagagcagacctcttcctcccattgtcagataatcctttgtcatgccggccgctgtcgtcagggaagccaggcggggatgctgtgtcatgctggaggcccagctggcagaatccagcgacagccaagagcgtgtttcagctggaagcattagagtgagttaggggagaggcatttcgctttttaacatccacagtgagcagagccctgtcccagccccttggagtgtacagagtggggaagccctggaacctgcttccaggagcaggtagttttgttggggagagaagatatgaacatatgaagccactaaaaagctgtaacaaccccagggaagagtggaatgcaacttaaatagagtgttgcagatccctctcttcctgccatacttcatttttatagagctgatgtgttttaggcaaacgtccagtctttgcatgtttgaattctcagaaccgacaatagtgcctggcacattgtaagtgtgtgttcagtctatgtttgtggatctgcagggatgtacccagagttagtcgtctggggtgggaggtcagtcagggaaggtttccataagcacgtccaaaaggggcatcccaagactgatttagaatacttttagtaccacagtggagtaaaaatcttgaaaaccttccaatgacagagcacctagaaaggctgtgtaagctgtagctagcgtcctttcaaagaagagctaagctcatggaatgtaagggaaatccccagggatctcaggcagtgtggacggtgagctccagctgaggctcgtctaggcctgggggttgggagaggtgttgaggggtgcttcctggcctcaaagcccaagggtttgagtcgtgactgcatctcctccgagactagagatgataccaggaatcaagagccctgcctaaaacaggacctggtaaaagtttgcatgctgggagaaaggatggactagacagcagcccgtccgcatgggggatggaaagtgggtgtgctgctttttgtcttgacctggatgtgaggtggagaaaaatcttccctagaaatgtgagacctcaggcctgttagagctttgaatgtccactacacatgtggtccaggaggccctcaagagagaaattagcatgtaaagacttgggggccagtgtcttcctgactgtgagctctagggcatcaggggcctggggagagtctggggctctttgccctttgctgacttaaatctccaccttgggagatgctttgcgatcagggcagggtaagtgagggaggagagagaagagaaagggcagaggtgcccctcggtaggaaccttttaaaagggccttggagacagctgcacaactcggggaggcatgtgcaggatggcagagaaggacagttccatccaagccttcatctcttaggaaaaaacttcagatgagccccgtctaggaagcccagaacattctccctactgcatactcaggtcaggttcttacagataaggtttctttccagggtccccttaagggtgccctgtgcagattgcagttgctactggtcctctagactgggcactacattgtcttcccatgctcagagtctttagttcctacagtttcaaactcaggagacatcttagaggtcatctggtcaaccctccacctggtgtgggaatcctgactgcagcagcgcttggttccaatgtgcttgctgcttgtggccgggagtttattgccttggaggcagcgccttcccttatgttatagctggaaaggccttgtactgagctctggccaccctcctcgctggccattttcacccatggcccctgcagctgttgtgagagatggtttctagacctttcaccatcctgcttgcttctgctggaagggcctccatttgtcaagctgagattctgtgagaatccagccaacttctgtcctaacttacttcacacagaggcagcttttgaagatagatgtgagggtagctgagccggctgcataggcgcagtctgtgatgggggagttctgagaagctttggctcggtgcttttcggatgatcatgagagaggcagcagcacctgctgcaagttccttcctccgacgcccagaatacatttcagcttataagtaagtaacttgggaatcccatgcagggagctgtgtggaatttattgagtgcagggagtttattgagtgcctgttaaatgccaggcacaatgctgggcgctctctgtgtgcctcgctaaatgaaagtaacctctctgagggagacagagaggcagagatatggtaatgcctaactgtagttatgacaattgagccctgaagggattcagaaagaatgtgtgtggttccatccagagtgggtggagctgacacattccccatgctgttcccttatagggccttcccctggggtaggcagtatcatgatctcaccagtagctgggaacacacaggcctgtcccacactcttggggcatttgctgagatacttacacgtttgaaccatgagatcaagaaagtgacctgctagagaattcacatcttggcatgtcaccaaacaggctggtgtttacaagcaaagtattttttacagcatgcggtttatctgtctccggtatctacctacagtaccctgggcactctcaggaagcaaaatgtctttctgttcctccatctccttgatgcttggcatctgtgtgggtcacatattcagcagattgggtaataaagagcatgcgttgcctttgcagcaaggttgcatcagatggctggacgtgcctggatgtgctctgccactggcatgaaggaccctgtgcagacaaggccaatagtgaaggtcagggattccaagaaagcacccagtttctcctcttctccctctaaaaatggtttcttctgcccacattctattgatttgccttaatccttttagctgttaacctttgcctcagtttagtggacacacatggtatctgcagtgggtctggctctaggagtgaggtgagatgaattgaggtaagcctggcagggtccctgctgcccatctgcccatcttgctggggaagacagaatagccttgcgctagtgtaaggtggtaagtatggggtcaggagaatgaaaagggtgccaaggcagccagaagtcggatgactgtgaattttttttttttccaatggataatcatgctgggacacagatataaactgaggttgtcctgggtaggtgagggcttatggacacatgggccagggagggcgtatgcatgtgggtcatacctgacactattatcagacactgttatcagtcatttatactgcagggtgcacataggggtgatgggggaggtgctcgtgcacaagaggaattggcagctgtttccttcctttgcttagaggacgtaggggaaagcattatctgtggggactgaactcagaattcagatggggctcagtttacagccacagggttctatcttatatctcaccatgatctcagtttggggattggggtggaagtatggacagatgaaaaccatcgggcttgtgggatgttattggctacaggtaaaagaacagtgtactaacgatggctttaaaaacaaggtgtttcaactcagccagaagtctaaaggtaggagctctagggttggttcattcagggagtcagcgatcatttcaaggactctgtctaacctaggctgccatcttcagcacattggcctttgttctcaggccagtccccttatggtcatagcatggctgccactgctccgggcatcatgttctcacataactgcgtccaaaggcaggcaggaaggttagattctccttgtctgtcttaatttgtcaggaagggaagcctttcccagaattcccctgctgaagattctatcaagtctccttgaagagaaacgggtcagtacccatgcctccgctccagtggaggaggagaaagcaagtccctggtgctttcgcctcatctagagcaagaggcaagctgtgtttgcaaggaagtggggaagggagcaatggttggctaagcaaagaggaacatttacttcaccaagtttcaagatgtttttatttattgggggggagttagtgaattagctttacttttttttatatctcaatattgttgaggtttttgtttgtttgtttgtttttttaaaatctcaccccctagttctggcaaccaccaacctggtttatatcactataggtttgccatttctggtaattattacttcttaagccacaggtaatgctggtgcataggatcccaggtgttccatggatgccttttttgtggtcccaggacatgggttctgtggtctgttctcccagcagctcctccactttcccgacactggggccaggtggagaaccccagtaggcagaattgtccagagggagggagcatatgtcactggtggcctaggcagcaggactggaaaggcctgagggcctgaggctccagtgggttggtagaggatggcagtcacctttgcaggcagctgtgggttggggagaggaattggtgctcagctgtggcctgcacattctgcagaatgagttctgttgtccctgctgattgggaagcctggccccagggaatgcagggtgtgggaagatggtggtggatgccaccttcccctccccaaaccactatcccctctatacatacacatgcaaacagcccaggccgtggggctgaccatgcaagctaagagacaaatctgtcccctctgggctcctctccactctgctcaggttgtcactgtgtcctcctccccctcttcccacagcacagtctgtgggttgctagagcacttagcacttcccatcactccctgcctcctcatcattccttggatacttgcctatctgtcccctgggatcatgagcaccttgctactgtcctgggagtcatcagggcatttcctatagggctagggtggtgccggccacagggtccatgcttcatggaaaaaaaagtatttttaaggcaagatacatatttctagaaagggacttgttcatttggttatctgtccagattccaaaccagttccgtgtggcactgcacagtgccctggacgagaacttacggatctctacatgttttcctccctaagaggaagaaaggtaatcaactatcctgttctgggctgaattgtgtcctctcaaaattcatatgctgaagtcctaactccagcgcctcagaactggattggtggccaggcctttaaagaggtaattaaggtaaaatgagatcatgagagtgggccctaatctagtatgactggtgtccttaaaagaagaagaggacacagataagacacagatggggtcaacagtgtgaggatgcaacgagaaggcagccatctgcaagtcaagacggaggccttggaagaagccagccctgccaacaccttgatcttggacttccagtctccagaataaatacatttctgctgatgaagccacccagtctatggtggcctgctatggcagccctagcaaatgaatatggaaggattctcccctgcagcttgtggagggagtgtggccctgctcacaccttggttttggacttctagcccccagaattatgagatcatacatttctgttgctttcagccacctgatttgtggtcctctgttatggcagccatggatactaatacacatgcattgtgtgttatgcttgtgtttaggacttcaccccctaagtgtatttcatctttcagctctgagtgtagttgttattcttctcttttgcagatacacctgaaaagttagcattcctcctgaggtcacacagggaagccaggctagaaacccaggcctgtgtggactctggcctgcaagctgttgcatttgggcagtggggagatgtctgtaaacgcagggattgaacaggtggtctttctcctgaaacctgggtgatccaataataactttctttttcttttttttttttggagacggagtcttactctgtcacccaggctggagtgtagtggcgcgatgtcggctcactgcaagctccgcctcctgggttcacgccattctcctgcctcagcctcccgagtagctgggactacaggcgcccgccaccacgcccagctaattattttttttgtatttttagtagagacggggtttcactgtgtcagccaggatggtctctatctcctgacctcgtgatccgcccgcctaggcctcccaaagtgctgggattacaggcgtgagccaccgtgcctggcctaataataactttcaaagcctaacagttgctaagtattgtggtgtcatagtaagcactttgcatgtgctgtcttcattagccattacagcttctgtttcatagatgagaaaatgagggcacttcttccaacggggacatttaagcaagaaaagccagtgacttggccaaagttgcataccaggcttgccagtgagaagacaaactgaggacgggttctctgaactgtgccctcttggctctctagaaagaactgtgtggaaatttctggattcctgtgtcttagtccatttgggctgctatagcaaaataccatagactgagtagcttatgaacaggagaaacttatttcttgggctaggaagttcaagatcaaggtgccagcagattcagtgtctggtgaaggctcaatttttcatagattgcaccgtctcactgcttcttttcatgatggaatgggtgaggacgttctctggggtgtcctttatgagggcactaacctcattcatgaggctctgccctcatgacctaattgcctcctgaaggccccacctcctaataccatcgagtcagtggttagatttctaacttgtgaattttggggggatacattcagacagtagcggaggttgagtgttttaccccaggccacacagctaagaagtggcataaccagttttgctcaagctttgcctgtcacacacagggattggcaggttcccctgtagtcccctgatgttctgaaaaggtcactggtcttagattggccacctgtgatctggctgctctcagggaagtcacttcacatctgggtgctttgtcctcggtgacctcagggcttggacgatataatactaaagtctctgatcctctcattctgaggttcccagtgcccatccttctataatacagggattaggagggagaatccctgagatgtttttgacatttgcctacacctgagggaacagttgcacatcttcctgatacggccagttggaagtgtggtttggccattcattccttccctacaaaattacctctttgcacaaggtagaaatgatccccaccttgtgccaggtttgttctaggcttttgatggtgtgggctttgagtgacgtccacaaaagcgtgtggggagagggttgctggtgaagtgatgtcactgtgatttcctcctctaggtgaaacaaaaacgtggttgcctgcagcctcattcgcaccagagagaagccagccacgggcgtggcaagccttggaggcccaagttgagccaaagacctctgtgtctttccctccatcctgtttccgtttgcctttaggcccaggtggctggcagatgacggtgaggagcgggtgatggggtaattcccggaatgcaaactgtaaccagggcagtcagaacaaggattgttaacctgcagccgcccagctcctggctcatcccacgaggcgttcgtgattttactcacctcattagaaaagtttacttaatgtatctgtcgtagattttagaactggaaaagaggttgagtgactttctttttctttttctttttccttttttttttttttgagacaagtctcgctctgccgcccaggctggagtgcagtggcgtgatctcagctcactgcaagctccgcctcccgggttcatgctattctcctgcctcagcctcccgagtagctggggctacaggtgcccgccaccatgcccggctaattttttgtatttttttttttagtagagacagggtttccctgtgttagccaggatggtcttaatctcctgacctcgtaatctgcctgcctcggcctcccaaagtgctgggattacaggcatgagccacaaagttcctgattctctgcggcccactcatgacctcagagctccagactcccaagctccctgacaccagtatttgggtggatgggaagaggcctgcagattgcagtgggtgaagaggctgtgcacacccagctgctgtggtggagtggctgtccgccagtgtgaccagctaagttgtcttctcatttcttgctgttgttggtgccaccaggggtccttacccctggcattgttgtgaggtgcctagggagctggcagggctagtgcacttcttccaatgggaacatttaagcaagagaaaccagtgacttggccaagttcgcataccaggcttgccagtgagaagacaaactgaggactggttctctgaactgtgccctcttgcctctctagaatgaactgtgtggaaatttctgggttcctgtgtctccctcaggaactggctccaggctgcccctgtacccagcggcccttgtctgtctcctcccaggccgaggcaggcactgcgatggaggcaccctcttcactgtgtttgccagtgcactgcagtggagaggttatgcctttgtagggttgtggggatagggctgaaagccccctgaaggcaggatccacgatggaggagcattatcgtactctggtgggctgggaacatggcccctttcccaagttctcctctctgtcagcctaacaccagcttttcggagagaaagaatcttccaggtttcctgagatttgcctgaggtccctgaggctctccttcccacttcaatctagaagatgggagaggctctaaatgacttaatcacagatctgaaagcccagaaggacctgagagaggcttggcctcctgcaggcatctgccttgtagcctcccgggaattggaagcttacagctttgcagcccaggccattacttggcagcccgggcctaaagacattatcttagaccaaggtgtgcctcccagtagccctggctgtgatctgagaggcacacagaacgcatatcccattctccttccagggtgaccaagtattcagagtgccaaatcttcttttggaggtaagctctcttcccttaaggtttctctggataaggtgtccaaacctctcctggcttcccttctctgtacatctcttttatcaatgcttctcctaaaatggggacacggaatggaatacggtgttcgaggtgtgacctgagtggtgcaggaatcatgctgctgtcacctccctccatctggacactatatttctgttaatgtagcccatgactgtgtaatttttcttcatgggcagcttctagatatggggattcccattccttcacagctcctgccaaaataatctgtggcaaagatctgtttccccagcctggactgttcacagccctgatgagtagcccaggccacctcatctgagtcccctttgagtggcccagggagctaaggtcaagggtgttcagaagctggtgagattattgaggcctgacccactttgcagaggaaggctggagctttctgcccaaagtgactgtgatggggattggggtggatgggcttccaggcctggagaaggtggggatgtttcatgcaggctcctacccctgaaaatctggccacccactcaccactgggaaccagctcctgtgtcttagcactgccacctccccctgggcctgccagcctctggcttcatttcttttttgctcaggaagcagagataaggtttggtgctcacctttgcccagttgcatagagaccctgtgacatggacatattggatgacttccctggctgagccatggaggaaactgtgtttcaactgaagacattcttgtggtgtctgcccccagggaagtctcttggtatgtgtgtgtgacacagggctcagtttggggcactgggcatggggaatagggggcaaaggaaaggaagactcaactgtgctttcagggagccttcagccagcaggagagagaaaccctgagcatgctggctgatgggaaatgtgtatcaaaagtttccttttgccaggaggaggcaggcaggactttcagctccccaagtctgggccatttctggaagcatgagggtttggagcttgtctttttattctaaacattgagcctgcagttttaactcctgggctgcccgttggtcttgtctgtcctgagctgcctgcacatcgatctgatcgtgaagggtgggtggtgagtgctccggatcgtctcagcagcatctctgccttagatggattctcagctgcccatctggaaggtcaggatgccaataggtgggggcatcactgtggagtggtagcgaagaattccagttttgaggctcacgagcttccaggattccaggcttggctctgcataaagctcactacagaatcttaaactctttgtgacttggtttcctcaccttgcctttgatagtggagttggaaagccccaatgcaaggggaggtgatggtctgctcaggcaccccgccccaagaatagagatgtcagtgattcacaggtgcacagagaacaagctgggacatcctcaaagtacacactctggagtgctgagaactggcttgttacccactcagctgctcactggcattgtgtttgtttgtttttttgagatggagtctcaccctgttgcccaggctggagtgcagtggcgcagtctcagctcactgcaacctcttcgtcccaggttcaagcgattcttgtgcttcagcctcctgagtagctgagattacaggcacgcaccaccacacctggctaatttttgtatttttggtagagatggggtttcaccatgttggccaggctggtcttgaaatcttgacctcaggtgatccacctgccttggcctcccaaagtgctgagattacaggtgtgaacctccatgtccagcctgctcactggcattgtgaccttaggagagttaattttctaaagctctgcttctccagctatgagattggcataacagtgtctacttcataaggctgctgttagaatgagaactaatatatgttatacacttagcccagtgcttggcatggagctgagtctctggaaaggatggctgttcttatgatcataggcaaatacagtgtggtcagaagagtccagcagggactgaaggaggggtggggctgtaaaagcagatgggattgcagaggaggggagattgtggcctgggggtagggacaggaggatggtggggaagagatagagaactgcagaaacagtaccttgaaggccccctgcaaaacttgtttggagacctggaaattcacaggtgtcagtcacccttgggctacagagggggctggaactcaggctggtcatgaaccattttgtgcccccattgtcccagccagagcttttggatgagggataggcacgtgaccagagccaggccaaccaggaaccttccctggagttttctgaatggaagctgggagagaaagtccttttcttcttgagggcatggcatgaaagaagcctggcagctttggccacatccactgccgtggagagacctgtcctggggagacagcacagcactagcagctgaagagaagcagagctggaaacttaagagaaccaatacctctgctcgatttgtcttcctctggcttggtgctgaatttgttagtttctatagtctctgtattagtccgtacaggctgccataatgaaactccacagactgggtggcttaaacaacagacattttatttcttcacagttctggaggctggaagtccaagatcacagtgctggtaaattcagtttctggtgagggctctcttcctgccttgcagacagctgccctcttgctgggtcccacacggtctctcctctgtgtttgtgcacatgggaagagacagctgtctggtgtctgttcttataaggacaccgcttctatcctaatcagaccccacccttaggaccacacttaccctttatgacctccttaaaggccctgtctccaaacatatttatgctggggattagggattcaatatgtaaattttgggaggacataattcagtctgtaacacttctctattcagtagattccctttctttttcttttcttttcttctcttttcttttgagatggagtttcactcttgttgctcaggctggagtatattccctttctgtgccttaaggaatggcattcataccactggtagaacacacaatgattttcagttagatacttatggactggtacaaaatataagccatgtattcatctatgtgtgcattaaagaatgacaaacacaactagtacatagaatttgtgatgttcacaagtgaagggagtattcagtattgctctgcaggaggctgagtttaataaaaagtcagtacaaggtcaatagtaatgttacagttggtacacgggtatgacagaaaactccaaggtagtgaattctgggtaatgttgcatgaactagtttgggttgggtttgtgtcacttggcactggtagagttttgaataatacatgttcaatttcagcctaaggctacctcttttcatgtaacaaatatgggttcctaaatgtttatttacataaaacctttatacatataattgtaatttcgagtcacaaaaagtggtcagcacctaaagacaactgtagtaaatatttttgtaaagaatccttttttatagtatctggtttgtttcaaatgcatctgttttgcaaatttagattcttaaacagcaacttgttatctaggattttggtcatcagaaacttctcagctggcacctgaaaaacatcagcacagtgacagttgatatatttaattgttcaaatgatcatcttagcatcaaacatgctgcaataaaaagtgttctctttgacatccattctccaaccaataataaatacacttattcaaaagttaagtaaggggtgtatttgagagctaacccatcctggtaaactcatactggaaaacctgataagcgtttgcagatctttttcagaatctgtaagagttatgttgtaggagagataatcacctgtagcactggactcagcatttttagactagaatatcctctcccgtcttgttgagtgatggtgatcatattttctgaatcaaaaatcaggatgagtatttggatatttgaaatcagaacttctcctaactatcatcttttatctagatggggactctggagtctcattgtcaaatttgtttatgtgctcatacaaattttaaaaaagtttgttgttgtttttttttttacttaaaaaattggccctaccttcagaccatcctgagacttatttcctcatcctagttttccccgaatatcttagctcgtttattaatatgatagaatgttaaatgaggtctgtagtcctaccaccccccccaatcctaacaaacaaaagaatattttctaatgttacctgtggaagcagatagcttggtgggctgaataaatgattagaatttaagagcctagttttaggtattctagttactgtaggctgtgtgaaaaaccaccccaaaacttagtggcttaaacagcaataatcctttgtcctgctcatgagtctgtaatttgggcagggctcaagagctacagtttgcatctattccacatggcatcagctgggctgcaatcagagctggaagatccacttccaaaatggcacattctcatggctggcaagttgtgctggctgttggttcttctccatgcaggtttctccacaaggctgcttgggcttcctcaaagcatggtggctgggtttgaaaagttaatcccaatgtagagtggagtaatagacattggagactgtgaaaggtgggaaggtgagaggcgggtgaagatcaaaaaacgacctgttgggtacagtgttcactattcaggcatgagtacactaaaagcccagacttaaccactatgcaatatatgcatgtaggaaacctgcacatgtaccccctaaataaatacaaataaaccaaacaaaataattatatattatgaccaagtggagtttatcccaagaatatgaaaaaaaccaaaccacaaaagtgaatggcccaagaaacaggaaggagagacggctaatttcttaagggctggcatagaaatgccagttatctaacagtctctggagtgtcacttccatatactactggtcaagcagtcacagagtccagattcaagacggtggggacacagaccctacttcttgttaggaggaatttcatagaatttggaggctattttttttttttttttttgagacagagtctcgctctgttgcccaggccggagtgaagtggtgtgatctcggctcactgcaagctcgcctcccaggttcacgccattctcctgcctcagcctctggagtagctgggactacaggcacccaccaccacacccggctaattttttgtatttttagtagagatggggtttcactgtgttaggcaggatggtctcgatctcctgaccttgtgatctgcccacctcggcctcccaaagtgctgggattacaggcgtgagccaccacgcccggcttggaggctgttttaaccataacaactggtctcacaaaaaggaatatccttccttctttttctttgagacagaatcttgttctgatgcccaggctggagtacagtggtgtgacctcagctcactgcaacctccgccttttggcctcaagccatcctccctcctcagcctcctgaggagctgggtcttcaggctcacaccactgtaccccacaaaatttgttgtattttttgtagagacagggttccaccacgttgcccaggctggtcacgatctcctaggctccagtgatcctcccaccttggcctcccaaagtgctgggattctagggatgaaccactgcccggcctatccttccttattacagaccttccctgaggtttagattcatcttctacttgcagtcttttgtggaggagtgaaaaagaaatgtttggctgggtgcagtggctcacgcctgtaatcctagcactttgggaagctaaggcaggcagatcacttgaggtcaggagttcgagaccagcctggccaacatggccaaaccccatctctactaaaaatacaaaaattagccgggtgtggtagcacatgctagtaatcccagctacatgggaggctgaggcaggaaatcacttgaacctggcgtgtggaggttgcagtgagccaagattgtgccactgcatttcagcttgggcgacagtgagactctgtctcaaaaaaaaaaaaaaaaaaaaggagtgtttataaaaacttgcttgtatcatttgagctcagttatagttagtaaatgttttgcttgaagccccttttatatgctaattctttaaaagtggctaataatttaaaagtggctcccccttgtcctgggcatatagtggagctttatttcttcagccattcccagaaattgctgagactgggaagtgcaggctcttggctttgcagcaacggagtctttcgcagcaagaccatccacagttaagacccttctcagagaaactccactgtggcaagaccctgtgctggctgctgggggctgcagatatggatcaggggacactccatccctgtgccccactttcaggaagcccaaagtatcactgatggaaagcaatggcctcagtgtcactttttctcagggtgtccttgtcccctggcagaacacagtggaagtgtgtctatattctgaatgaactgttgactacttctcttttccttcctggggcacttgattttagaaagtgccctggtctaggaggaccaagacctggcttccagctgtgtcagataattacccccactctatttttctcatcggtaaaatagggaatttggtctaggctgggggttggcaaactacaacttgcagactaactccagcccaatgcctgtttttctaaatgaaagttttactggaacacagtcatgcctgtttcttcacgtacatctacggttgcttttggctggttacaaaaaaaagaacatatggctcacaaggcctaacatatttactgtctggccatttacagaaaacacttgctcacccctgatctaaaacaatggttttcaacttcattttagccatactgttttttttctggaaacaactcttctttatttttaacaataaaagcaattctcacagcacttggcatgtgcctggcactgtaccaagtgctttaaaactgttaacttactgcttaatccttatgaaaacattatgagatgagcagtagtatcatcacccacattttagagaggagaaaactgaggcagagttaacagagaggttaagtaacttgcctcaggtcacacagctactaagtggcaaaggcaaaatttgaattcaggagtcctgctctagagtttgccttcttatccactgggccatgctgcctctcactggtggccttatataaaaactgggtggagcaggccccactaactagaactgatgtggcatggtcagcatctcccccttgcctgttgactcttctttctgcagccccccgggatctcagggccatctctggcaacctctggaggctataacatctggcaaattaggcttctaagcttggagaggggacatcagtttgttttggttgctacaagaggaattgatcctggttgttgggaacttatgcaggccaagaactgtagaaagcactgttctctgggactgaggactccagacaaatagactcatttttatcgagcatgatcataattatgcctgataaaaatgagtgctagagacttaggtccacatttcaaaaccgtaactgaaaggaagacatatttcaatagttgccatgccccacacaaatatgaaaaccagtaatctattggaaccagttccctgggccagagtgatttgccttagactcttgtcataaaaatcagcaaaggagactgcacactgaaatgacacttcacactgaaaagatattgacgctgaaaggagattcacgctgaatgtcaccttccctgcttcctcctgcaaatgaccccacatagcctggggggcatttaggagctttagcatagcacccgcctcttgggcaggtgggagcctggggctgcagaccggccctttcttaggatgctccctgtttgcagattagtgacttgattggcccctcctccacccccaccattcccataagggactggttagtctgcagggatgacacccagcctcctccacccttggggatgtaaactgtactaggagcaggaaaggctggggtgactcactttcctgccagtgaaaagctgacctcaatcttggtagtggtttgaaggtgacttttgtattcatctctctgggatcttgggagacagtttcaactatggtatctactcagtttccctatgggaccccactctggcctgcagctcctctgccctgtacagaagggtctcctgttctaaggttttttttgttttgttttgttttgttttttggacagattcttactctgtcacccaggctggagtgcagtggcgcgatcttgactcactgcaacctccacctcctgggttcaagcaattctcctgcctcagtctcctgaatagctgggattataggtgcacaccaccacacctggctaatttttgtattttcagtagagacagggtttggccatgttggccaggctggtcttgaactcctaacttcaggtgatctgcctgcctcagccttccaaagtgctgggattacaggcgtgagccaccgtgcctggccctgttctaaggtttttgctgtctctgttttctccttggttggcctgtgcctgacacagtaagatttgggacccctgagattgagtggggtggggtcttcccaggtgcttccctcttgcttgtggtctctggccctgttccccgccccagccatcagcaccagtcccctaccccctcaaaaggctcaaagacttcctgagaacccggaatctcagtttcatctctgctggagatttttgatctgggggaaaggctgctctctatatggctgctttcagaccacacttggctctcccttggtttagccaaattggggttttcctcattttcaggagccagcttttctgaagtgttccttcctggcagctgcattccccatggtcctgtctatcttaggggcaaggacttaggcatcgggtgtcctagaggctagaagattgttctacagagaaaagtggttttgtggccgtaggtggtacccagacgtgttgcctgccacctgggtgcaagcaggaccggacctctgtgggtggtggagggagcttcccatgtgtggatggaggccttgctggggaagggtagatgagtacagctccgtgtcacagcccggggacagccccacctgctgcaggcggccttcgctaggcctctgtgaaggtccccaaagcctggctctcctgtggcttatcctgggagaatatttgccctctttcatctaatagttaactattgacagaacattaggtacttgaataaaatgaagctgtttagtttggggagatattttggaaaacagaagcttagttctcattgaggttaccttcttggtgtaggtggttgtgtaggtttttgttttgttttgttttgagacagggtcttgttctgtcacccaggcaggagtgcagtggtgcgaacacagcttactgcagcctcgacttcctggggtcaagtaatacttccacctcagcctcccgaggagctgggaccacaggcgcacaccaccatacccagctaattttatttttttgtagagatggggggtctcaccttgttccctaggctggtcttgaacccctgggccccagcaatcctcctgcctcagcctcccaaagtggtgggattacagatgtgagccaccaagcctggtcggcttgttttaaacaacttaatgttattgaaaatatgatgccaccctgatattgagataaattttaagggaagaatcacctctttctcattacttgaatactgtgttaatttttgcatattaagtcaatttcctcctttaatggcaattggttgatccatggtcatgttaaataattttgcatatttaattaactcgggtcttgatttgtctccggtcctgtttattactgatgtcaccgtctgtgtgtgtcttgtgatgtggagactttgcaagctgttttccacggagtccaagccccacagccctgctgtggcactgccttcatcagtgacgcgttcttggcggagaggatctagttgtagtttgtgcttcctggctgtcaagggccttgccttcccttctacaggaaacagctgagaaatcgctggtgtgctgtagccttaaataacagcacctgccactcagttgtgttgtctttcatgagttttccaagtgctctcctgccttggggcatgtgggaaggaaggtattatcatttccgttttacaaagatcccccgagagactgcaagtctcttggattttgctgctgacaccaggacaggaggtcacatcctctgaccctccatcttatgttctttccagcagccccagaaccagccatggaaaccaggggcagggcctctgtgctttagttccctgatctgtaaaataagggatcataatagtacctattttgtagggtcactatgaagtttagatgagctgccacatgcctgggacagtgcctggcacacaaccatgcaagctctcaggagggtagtgccccgtacctccaatcttgttatgtgggggacagacagatcatctggcttgggcgccccaccctgccatgcagataaatccatgcccagataacggtcatgtgggatgggaaggtggggctctagcgtgtgccttcttgctgtcctgtgctaggcatcttggggtccggcctcctgaacttgtgccctttcctttgccagagtgagttgcccaagaggctgagggtgggcatgaggctgcttacaaagctgagctgatgatagtttgcagggcacagcacccttcactcagggatgctggcatactctgtgggcttcttaacaggcaacaagttctgccagcccattgtacagtccccggctggctgcagtgtctgggcattctgcttctcagccttgccccactcactactttctcagtgagtgtcagtgagtaaacacgcacgcaaaagaataaaaccatcaacaagagaaagtgtggtgtgtaagggaaagggagtcattcattcattcattcattcagccagtgttgactacagtgtgccaagtcctgttctagctgctggggtgcagtggcgatcagggcaggccctgccctcatggagcttacagacaagaccatgacacaggtgcatgctatgaaaatgagtgagtgggacatactgggcctccccaaagttggtggggaagagagagaaggtaaaacccaaaataggttctgtgactggccagcacctcaggggaggcctttcgaggggcaagggtggagattttcatggctaagtcctgttgtctaggggggattgcccttacagggggtctgcatgacattagtcatgaatccaaggtcctgtggtggcatcagggctggcaccaaccacagcttgctgccgatgtccctcccatgctctgggtacctgtcatatttgacacctctgttgcagaggtgacagctagaaaagcatccattgcctttggggtgggggttcccatttgttgtctcatgggaaggaagggatgctttggaaaggctgtggaaacccctttgggctctgggtggataacatgagtggggccattggaaggggtaaagaatgctgagtcatgtctaaatgacagcacttcctgggcactcctacatgacttgcaataccccacaggcagggcccttcatctcagcctgtctaacagactgtggatttggattttcattcaaccattaaatttttaaaaaattctgtgaagctaatagtcaaagggttagtagtctcatttattcaccagatatttttcagcaacaacttatgtacctggcttttttctaggagttggggatatagcaggtgaacagaagagacaataaatcttgccctcatagtctagccttatgatagcagaagtctttctttaaagaaagatccctggaatctttaaatattaactcctggagttcacgtaggcatcgtgacagaggcacagggacagtggggttagctgggatgtccagggacagaaggaaacagaagcagtgtcactggtgaccagtcagatgggtggacgtccagcaccctcatgatgtggcagaagtcagggaagaacgatattctgtttaaaaagttgagcttataaatagccatattggaacatgtttattatgttgaggaggtaacttatacttgactggtcttctaatagagcagcaaatgtcattgagtattttctttgtgcctgggtacatggtgcccatggaaagatgtgttctttgccccagggacgacgatagttgagtaattagcaaataaaacaagggcaagtctattgagagccactttctatggcagggcctgagatcactatggaaataactcagtaagagcagtcagagaaggcttcctggaggaggtgtctccatgctagtcagaaagaagtggggaacgtgttctcagggagttagtaacaggggagcatggcttgtgctcatgggacagagtgactgctctgtcacagtggggttggcaatgaggggctagaggttagagggcaggggacagtggagaccagtggggggcttgacacactctgcagctgtgagccattgaaggttttgcagcagagcagtaccctggtgctggttgtacttagggtgtcagcgaggtggagcgagctgggagggcaggtatagcaagtgatgctggagagaacagctgaatgtggctctagagaaacaggctcctgcctggcaagtcacagggttgtgaataaatcactcatgctttctgagcctcagttcacctcatctacaaaatgaaaataagatttcaaatcctatttcatagattctttgtgagtcttaactttaagaatatatgtgacaatgctttaggaaaaaaaaaagtaaagtgtaaattcaagaaaaatctcagctgttggtgtcaggatccccttctcacattggcttcctgtacctatgagatagcaaaaagtaggggagaaatctcatattcctgtgagtacatgacattatcgaaacaccagaggaccagggaggatggtcagtgagctcacaagcattgatgtctgccatttgcatttaatcctcccagcagccccatgaggtggggaaacattgggaatcggagatgaacagctgcggcccccacccaaggtcacttagctagttggtgagacagggccctgacaggcactccttctgtagtagtgtgcctgggctgccatgacaaaatcccacaaactgggtggcttaaacaatgaacatttattttctcataattctggaagttggatgtccaagatcaaggtgtcagcagggttggtgtaatagtccatttttatatcactatgaagaaaaacctgagactgggcaatttgtaaaaaaaaaaaaaaaaaaaaaaaaaaaaaaaaaaaaaagaggtttaatggactcacagttccacatgtctggggaggcctcacaatcgtggcagaaggcaaaggatgagcaaaggcacatcttacatggcggcaggcaaaagagtgtgtgcagaggaactgccctttataaaaccatcagatctcgtgagacttattcactgtcacaagaatagcacaggaaaaacccacccccacgattcaattatctcccaccaggagggtccctcccatgacaagtggggattgtgggagcttcaattgaagatgagatttgggtggggacatagccaacccagatcagttgctctcttctgaggcctctctccttggcctgctgatggtcaccttcttgcagtgccctcatgtgatttttcctctggctctgtctgtgtcccagcctcctcctctcataaggacaccattcaaactgaattagggtccactgacatgacctcattttaccttaattaccactctaaagtcttttcttcagatgcagtcatgttctgaagtactgagggttagggcttcaacttacgaatttggtgagttcacagttcagcctgtaacacatttcttcaggatttccagagcgtgcacagttttgagcagaaaaacgcactgctggaggaaaaggagagaactggaaaattccagcaagctgtcatagacttgatctgggggaggtggggccccactgagaaagatgacaaggtgaacaaagatcagcaagtgattcggtgcacccagcaaacttagaatagatttacttcaagaaattcataaatgaaaaaaaaacaaaaaaacaaaaaaaaaacttgggtttcaaaaaatttctattaacttgctttataaaaagatttcataacagggttcctttaaatacccagccgcaccagtgtacttaacaagtgatttgatttaataccatgtgattaaagcactacgtttgcagagcctagccattaaaagcaggacagacaacctgtaattaaaattttgctgaaccctcctcctccaaagaccagttcagttcgcagaggttgatggtgaaagcagccgaggcacttcaactttgctccccagtgtctttgctctaggtcagtgtgcacagggatgagaccagtcttgggggtgtcagcaccagcccctggccccctgcctggggctggcatacccctcctgctgtcctaggacacagcattggcttcgatctattccagcagcaatcttaccttgtccttctttatctctgtttctagggccagtgacattggtctcctcagttaggggcaggcagacatagacaaatgaatagtgacttttgtccgaacttcatgttagcaatttcaacctgcaaacattttacctccctcaccagagctgcaaacacgtggccacgttgattggtttacttccagtcctccctgtgagtggaagagcagagatccaaaccccttgtaaaaagaggtagacaataaccactcccagagctgtggagaggctgaatgggcagaatgtgtataatcagaaaagcacacatgaggctggttcatttgcagagaagcaggtcatgattctcagcgggtaaaagccaacagtgattaggaggaagaactcttgtcatctgggaccgaggaaatggggctttaataaagccagttgctgtttgggtgtcagagtctgagtcctgtccttccatcatcagtacttattaagaacctactgcatgccaggaactgtgctatatattgagggcactaacagtccctctggtcagagagagccttctagcatggaagccttagtccctgccctggcgtgacgcacaggctaacggaggagacagacatccacgcacacactgaggctgccagaaaaagagaatcacagggcactggggagtccctggggggtggggggagcagtggtgcctggggaatcaggaaaggtttcttagggaagtgatgattgagtaagttgagaacaaaatcaaaagtcgaaggggagttactgtggccaagaggtgggagaggcgtgcttaaggcagacggaactttatatgcagaggcctggaggtgagagagtgagtgcagggggtaggggtgactcaggttatagggacccagactttgaggagggtggagggaggtgagggacagggctggagagtggagcggggaccagagtgagaaggccacatgtgtggagatgagggatccagaccttgtcccaggattttcttttggtgtgttgaaaatgttctggagctggatagaggtgctggctgcacaacagtgcgaatgtactaaatgccagtggattgtatactttaagatgcctaaagtagttaatttcatgttacatgaatttcactttaataattaaaaagaaagatatgatctgcaaagtatggaagtattgttttcaccctgtccccacctacccccttccgtcttgccttatgccctcctggaggtaacagtttgggtttgtttttgtttgtttgtttgtttgtttgtttgcccaggctggagtgcagtggtatgatactggctcactgcaacctctgcctcccaggttcaagcaattctcctgcctcagcctcctgagtagctgggattacaggcaggcgccaccacgcccggctaatttttgtatttttggtagagatgggggtttcaccgtgttggtcaggctggtctcaaacccctgacctcgtgatccaccctcctcggcctcccaaagtgttgggattacaggcgtgagccaccacactcggccaggtagcacttttaaaaatattttgtttcccctttcagtgtttcttcatgcatgacaaggaatatattcttattctttcttatatcaaaggtgccattctgaaaatgctattttgtaccttgcttttttcatctaagagaatattccatcagtgtcttccatgccagcacatagtgatcctccttatttttttcctgggtatataatattctatagtatggctataccatgctttattcatccaccccctatttctggatgtttgggtggttcccagtcttttgcttggacactgtatactgtgtagtcaaaggcaaatcactcttggctcctggcctcagggagcctggattagtcagggtctccagagaaacagaaccatgagagagagagagaaagagatttggagaaattggctcatgtgattgtgagagctggcaagtctgagatctgtagggcaggctggcagcctgggaattcaagtaaaagttgatattgcagtcttaaatccaaaatctgcaaggcagcagactggaaactcaggcagaatttttatgttgtagtcttaagccagaattatttcttccttctctttctccttctccttccccctcaccgttcctcctcctcctcctcctccttctcctccttcccctccctcctttctccttcctctttcttccttcctccttccttcctttcttcttgaaacctcagtctttgctcgtggggccttcaactgattggaggaggcccaccaacattacagatggtactctgttttcctcaaaatcaatttattataaatgttaatcacatctgaaaaataccttcaaagcaacatctagatgagtgtttgagcaagcagctgggcaccatagcctccccaagtcaatacgtagaattaaccatcacagatccaagaaggatgagggtaaaaagaccctgggaatgcagaggagaggagcctgggttgcctgtgtggctatcggaggtaaagatgagtcctctcgttttataactgaggaaactccggctcagagaggtaaattaaattgcccaagattacacagctagtaggagctagaagcagaatctggcctgggctagtccagtacaaaactcacatcctaaccccatgggagttaatgctgcttcatacgtggggtgtgtgtcatcctggaggagaaatttgatctggccccagaagaagaaggtgttgatgaggtagataaagaagagtgattggaagctggatgcagtggctcacacctgtaatcccagcactttgggagggtgaggcgggtggattgcttgaccccaggagttcgagaccagcttgggcaacatgaagaaaccccaactcttcaaaaaatacaaaacctagccaggccactaccattagtgtgtgcctgtagtcctagctactcaggaggccgaggtgggaggattaattgagcccaggaggttgaggctgcagtgagtcatgatcataccactgtactccagcctgggcaaaagagcaagaccctgtcttaaaaaaacaagcaaaaagaagggcaattggcattttcagctcagagaactggctgtgcaaaggccagtgcgggaagtgagccgtctcggaggtagccaacatgtggctgaagcagtctttaaggacaagagcccttgcgtctggatcaggaaggctgccctggactgcactaagaggcatttgggcttcatttcagggcctaaagtcacaaaacggcagcctccagccaggtctggctcagcccacagagctgctggggtcagagcagctttaaaacactacgtgcagggcttggaaggccagcagagcacgggacatccctgtgtttcatgacctccccctccccatttattccagtcacctgcctggccctgtgtcctccatgtgacccaggccaggggtctccaaaatggcttactttgcaggaaaagacaaatgtgtacacttggctcattgtctgtttatttttgtacatgtgtaatgttgcactgatgtacagtgtgtacattttaaaaacataccaacaaagaaatttaacaagataagtttcaaaaagtaagcattctaatattttctttctatgacccagtgatcactcaggcaccccacttttgaatccctctaattagatgatggggagttaatgaaggcaggtttctgtgacaaaagctccaggtggtttctgtgacaaaagctccaggttgacacatggtggcagggcggagcttgagaggggtgtggttaggtcaggtcagcggacaagggccatatccagccacccacgctggccattcgcagtgtgccatcactgtgcggggacgggaaggcagcacactgcactgtgaatgtgcaagtatatctgaggacatcctgctcaccatgcctctggccgcctctgtatcaggtgctgtcctgggccctctgacacccctggtggctggtgtcattacccagggggaaggcagtcgcatccccagcagtgcttggccatacaggtcaccttccacggagtggagtctggtgtcaccgggcaccctcaggtctgatttgcagtcatctcaccaggtctcacctcctctcagcaagacctcccctcacctcttctttcctgaaactgtcttccagctcctccttcctgccggggcggcttcctgctgtcactctgaagagggagggtctctgttcctgccgctcttcagttcagacagatgccagctgcccggagttgcacccatttggggataaatttatttttctttccaagtggctttgtggtgaatgggcttaaataattccctgactatcctgtttaaatttgctccctctcccccagttctttgcctcctctgttttatttttctccatagcctgcattatcctgtgcataaaaactagtgcataatattgcattaaaaaaggaaacaaaattaatgtcttaaaacgaccatccttttattatttgctcagagttctgcactttgggcaggagttttagggggtagagagtgggctgggaaaaggtcagggcatctctgttccttgtggttcagcccagggccgcttgggaccctccattcttctctgcgtggtgtctgtgtgtggttagcttgggcctcctttcagcatggtgttgttggctttattgaaaggtgactggcttccctcagaacagaaaagcaaaagctgctagacccggagtcacttgcgctacgtttctgagcatccagccacacactgggaagtgtggcgactatctcgtcccctaggagtgtggtgtgaaatgctgggacactcgatcaatgttagctctttcattagacacagccctggactgtcagagacccagctcttgaggtaggtgacttcctgtgtgacctggcccaagactcactccctctctgaatctttaaaatggggagaatagaaatatgggctagccacatgtctacctcaaggggctgcttggagggccaaatgagataaagagtaatagtgatgacaggtgttgggaactgggtatgaccaggttttcagaattttgctccttggagctcccagttccagacacagggagccccgcctctgccaggactcctgggggcagggtccagggtgcaggggaaaggtcccagcttccccttttgaggtggccaagcaggccgccgtcaggtcagcacgtaggccttgagtccagccacttttgttgagtgtttaaaatttaccagggactttacatcttttacatcttttctcatgtaccctcaaaacagttctgtaatgcaggtgatgctttgccccccgacagctgttctatggcaacacggccgagtaacagaaccagaactccatcttcaacccactgggatccagaccccgtgcctttttcccacaaagctggccagtgacagagactcttggcaaaataccagaattttccttactgtgaacactgccgactttaattagattaattttcgattttcttttgccttcaggggtttaaagctgacccagctggattacagcagcgcactgtgagtggaacagagttgcggtgtcaggacctccaagccctgcaacccccagcacaggctttatttatctatgcacccccattgagaggctccctcaccctctgaggggatggaaggtccgtggagatgcagctttgctctcccgggagggtctctgccctcaggctcagaccggggccgtcctaaagcctccctgccccggatgccttttgatgaaggctgctttgtgcacacacatgtgctgggctgtggccgcaaccccaagccctagttatccacagtaaacacagaacagcaaccaccccgtgcagccttctctctccaaggtaaactgttggagtaagggcttttgcctggacgaaggcctagtcaatgagagtgctttgctgactctaactcttgcttttcaccctggggagccaaccacaaacatttgtggagacccacacatgccaggcagggcctgtgctgcagaaacgtgcactgtggaacaatcggcctcagagagccgccgaagaacaatgcaggcttgtggattgtccctcccggtcctcgggcagcggcgcctgtgtacagagcacccaggtgtgcccccttgccctggcccgagaggcgccgaggatggggcctgtgttttgggggtgtatggtcacttgcactgaggctgcccggggcagggttgacctttggaagatcaaatatgtggccttctgggctttgcccaggccagctgctgacccaagggaggaacactcagtgtcgcgtgatgtgttcccctgtcctctggcctggccattgtcattgcaaagctgaagagatagaagaatttgcggtagctggggaagggaggcggggtactggtgccagtgaagtcccttcttgagatggccttttggttcatctgcggaccttgctgtctgcccatttaggcgctgccctcaccctgggtcccacttgccactctgctcacgttgagagtcctctttctatgcggttctctgcttcagccaacacaaacagcagaaataagccgggagaagccacctctgaatggaggttctttttccagattcgctgtgccagccggggcgtaaccgtttaattgctgacactaagtctctccgtaataccaaatgaaacaaggttccatggtgccctgagtacaggatttgagtatgacactaagaaagcagagaataaaaggacgcagggaggattcggtctgctcaaatgcacttttaaaattctcctatttacaccgtaattccctattctcctccattaacttgttttggtggtttagggcttgtcttttgtgtggttttggttttctgggcttcgccactgaggagagaacattctagaagggtgaaattgttaattattcttaaaactttgagagctgcttatgtggaatatgtcctatgagagcaccttgatattgcaagtcgtggcctccattcccctgggatgatctgcggggacagggtctgcccagagccctggtgtcagggtgtgatactgactgagtttcacaggctggcctgggggagccaggacttgaggttggagacgtgaggagaaaatcacaaacagaaattgtggctctagacaaatgctgcctcatccacctgaggcggggagtttgggtagattggaatctgacctgtgtttccgccccaggaccaggtggtagcaacggtatttaggtttttaaggtgggtgatgtcaaaagccatgtccagaagaaaatagtcttgttggccctattctttcaccctaagagatttaatccagagacggtgtgtaggatcctgctgctgagatgcgccgttccttccccggcttctctcacacctggacttcccttctgccatattttgtttgtctttggccaggacactgaaggatagtgccatagcccctgcgtggccctcatcttcagctctttctctagtacctattttagataaaagcttttttgagataaaaaattcatataacataacattcacccttttgaagtggattttttttgtcttcttgtttcttttgtttgtttgtttgagatagtctcgctttgtcacccaggctggagtgcagtagtgcaatcatggcttactgcagcctctatctcccaggatgaagcaatcctcttgcctcagcctcccaagtaactgggaccacaggtacacaccaccatgcctggctaatttttttgtagtttttgtagagaaggcatttcaccatgttgcccagtctggcctcgaactcctgggctcaagtgatccgcccatctgggcctcccagagtgctgggattacaggtatgagccactatgtccagcctaaagtggatggttttaaatatattgacgatgttgtgcaaccctcaacactatctaaccccaggacatttcctcaccttttacgcccattaccataactctcatttttccccagcttcctcagccctaggcaaccacttatgtgctttctctatagatttgtctattctggacattttataaacatggagttatacaatatgttctcttttgtaactggcttctttcacttagtgtaatagtttcaaggttcatccatgttgtggcatatctcagctcttcattttttttttatcactgagtaatgttccattaggtggttactctacattttatgtattcctttgtcaatggatggagctttgggggttgtttccatattttggctattatgaataatgctgctctgaatgttcaagtacaggtctttgtgtggatgtatgtttctaattctcttgggtatatacctaggattggaattgctgggtggtatagtgactctatattaaccttttgaagaacgccaggttgtatttcaaaatggctgcaccactttacaatcgctttagcaatgcttgagggttccagtttctctacatcctcaccaacacttgttattatgtctttttgattatagtcatcctagtgggtgtaaagtggtatctcattgtggttttgatttgcatttccctgatgactaatgacgttgaacatcttttcatgtgctttttagtgttaaaagctcaggtttagatgtttatccaagtgtatatctttggaaaaatgtctatcaattgtttgcccaacttttagtttggttatttgtctttttattgttgaattgtaagagttcttcgtatactctaaatactagacccttaccagaatttgcaaatattttctcccattccgtgcattgtctttttacttgatgatttgctttgaagcatacatatttttaattttggtgaagtgcaatttatctcttttacttactgtttcattggtgtgcttttggtgtcatatccaagaaattgttggctattccaaggtcacaacaatttacttttgttttcttctaagaggttcatggttgtacaacgctctgacatttaggtctgtggtgcagtttgagttaatttttgtatatgttgtgagctagaggttcagcttcattgttttgtttcattttgttagagacagtgtctcactctgtcacccaggcaggagtgcagtggtatactcatagcttattattattattattattttgacatggggtcttgctctcttgcccaggctggagtgcagtggtgcagccttggctcactgcaacctccgcctcccaggttcaagtgattctcccaaattcaagtgattctcctgcctgagcctcctgagtagctgggactacagtgcatgctaccatgcctggctaatttttgtatttttagtagagaaggggtttctccatgttggccaggctggtctcgcactcctgacctcaagtgacctgcctgcctcggcttcccaaagtgctgggatgacaggtgtgagccactgtgcctggccatctttactgttttacatgtagatacccagttgtctcagcaatatttgttgaaaatgttttttccattgaattgccttttgtttttcttatatgcctctttcctactaaaaagtaacttagttctctccttttcttccccccaagcccacacacacacatctgctagcctgcctcaaagtaccaggcatccctgctgctctaggaaggcctgcattgccagcccagaaccttgaccctaactcccaggtccctttctcagatggatcttggtgtacccaggtctctttgtgtctttattagtctctctggatgctagcattcatctgcttcagggaaagggaatgaaggaggagctgcatgggatcaaaaaaccccacattagtgtgtgtgtatattttttcatgcctatatttctgactcccaaatcaggtgtaaactttcctagtcatgaccctcttggagaccctcatccattcgtacaaaaaatgttcacaagttagataattaaatgaaggaactacgatgtctctgatggacaagtgattcactcaagtggtactccatccatccatccgtccgttcatctgtccatcaatcagtctgtccacccattcatctactgagaaataaaagagctggttgcttggtccctgtctgccggctgggtcagagttctgctacaggtttgtatgttgttagaggctcaggttagctgcccatccaagtggaagccaatttaccagaaagccagagtctgtggttactgtggctgtcgtcacgggtagagtgcttggtgcgggtcactggcactgaggcctttttagtgagtgggtcccctcaggagggtcaatgacacatctccaatcagcaaacaagagttagagcagagggatagtgtagcctcagggccccttcctccgttccaagatatctctgtctagatactgcgcattagaatttagtactgaagaatgaaggtggaggctggggaaacattctaactctcgggggccctgtgccaaccacccgccttcagtggtaacatccttgtcacctttgtttccatcacacctcacctgtgttgctttctacacatcctgaagtttaacttaacctggacacctttgggccccatgacccattggtgggagcaccacactactacttagaaagtggggtttttgactgtggaccaccgttcgggaccctctctgactgggactgtcattcccctgtttaccggaccgtcgtctttctgggtactctgtcctgcctgtcccagtgtgcagggctcctcctcccatcctgaggagttctttcttggaattttggctcccccgccctgcagcttggtttccactcccacctcaaggattagagttctgacctgaacctcagaggaggacaagtcccctgcctggcaggatgtggattcaccagggccgggggcacgggattggatatcaactattccactagctgcaggcatcgcggccccacccagctgacactgctttcgcatgtattgctttccagagatgagagcattctgcagtactgcccgggggctgtcttctctccatttagcaatgcgatgccacaattttgctgtgccattacacatttttccttcagcgtcattccagcatcagctctctaatatccctttttatagattttccatttcacagtgagagaaggtgagacagcaaatactgttttcgcaaatgcaggggctgatgactgagtttgatgtttttttttgtttttgtttttttttgggttttttttgttgttgttgttagattcctgagacgtaccacgtcccagcatgaattgtgtaacttatctgccctgtgtcgaaaattagactttgctcctgtattttcagaaataattcttgacaccctcttaggttttcaggctgtgttttggctctgccctcatcttatctctgggttccaagagcttttttcccatttctctttttttccatggcccatgcctgagttgggttggcaggttctcctcttcttgctgtgtccctgcagagtctctttctggcactgccttaaccactgcacttcatctgaggggagagagaggaagagccacttggctagggaagcgagtgctttctctgctggtaaagatgtctgggagaagggtccccccacccctgtccagtgtgccccaggggtcgggcagccagtgaccccttccacctcatttctttctttttgttgcctgcacaggactggagagctagcatgagtatctgtcctgcaagagcttattaagccctgcttatacacgtggcaccagggaggtgttattatcggtcatagcaaggcagggagggacagcagacgggaaggagttaaagttctccacaaggaaaagtgtgattaagtggcaaagggaatggtttggaaataagtgctgggggctttcaggggaaggggaggtcatatgggccaaagcggggcagaccttctgtctgaggagagtgagtagacccagaaggatgatgggtttggagttgggtggagagggacccttattggacagggaggatgtcactgtattctccctgagggacctcctgtgcgatttggtgtctgaggggccgtctgtttcaagaagtgggaggcgtggtggggtgtgggggctgggtaccctgagagtgtggtgctgtaatcaccctctggccagcaaggaagcatggcaagacttggccgagacagctgccagtgtcagaggaagggtcctgggccggagagtagaggcttggcaaggcggcagggggcaggaggcatgagaagctggcttccatggggcagggcagggaggtcatggaccacgcatggtgtggacacacccgtgggaacagagaagaaggggagagggagacattttcataaaaggtccctcagggcctaaagacaggcttctggggataaaggaggtgcctgggaatggggttgattctgtctggctttctgggggcctcatgcacatgagggcgtctttgttgcctgcataggaccacgtcatgccctcctgcctcagggtcccctctgtgtttcacgtgggctcctgaggcacattgcactgcactgaccttccccctatgtgctgtggtgcctgggcccagagacggctgtgaccttcctggcttccctgctagcataggttagtggtggtgcagaggtggtggtgggagtgcttgcggtagtagtagtggtggtggtaataacggggttagagctgctgctctgcgctaataaacgttttattacctctagttcgtttagtccttagaacaaccctgtggggttggccggtcatacagataaggaaactgaggcatagagacttcagcaattgcctgaagtgccacatctagtgaggggcagagcctggactgaacccccagcacatggctccagactccatgctcctgggcactcttcctcctcagcagagcaggccagcactgcagaatcgctttcatcatgccatttagaaatgggcagctgagggtcagcacctctggtatgcccagggtgtgccccacctctctgccccatgtctgctgtggtggaggggagggaggaggatgatgggggagtgcccagatgggaactgctggccttcagggggccagctgggccattggactggacaaagcctgagcacagccccagttgcacctggtgtgacccccacacatgacctggccatggggaaatctggccctgtctgggtggggccaacagtgctttggccctaagagtcttaggcttcccaaagagtgaggaaggacaaggaggcagagcaggggaaaggaattcacagttcgtgaaattagatgctgcagaaaatgttaatgaatgccctgttatcttaattttctcagagtgtgaagtgtttaggcatcatgaggatgagagtgttaccaaacccaggagagctttgagttcaggtcgcattattcttagatttgtagtttggtggggaaaggagtcggactatttttagagggcgccgatctcggtttgtaattaacagacagtgtgccctcctgctatgcactctcctcactcacactttgctgtaattagtgttttaatcatcttctacaagatcctcaggtccgcaagggcctgcaacatgcctgtcttcttcactaccccgtcctccatgctgggcatatgagcagggagggaggatcgattccaccatgagggcttgtaggaggtgccaacaactgggcagtcgaccagtgggaagttgagcaggtggcaggggcagcctgaactgagcatggatggacagaaggtatgtcatgtctggggaaagcaagtgccaaggatcctgggatgaagttggggaatgatgggaagaagcaggacaggaagtgccttgaatattaagtcactcacttctcttgtgtttagggagacagggctgaaaacacatactttgtagaaagaacaggaacggtttcatgattcttgtcttttatcagacagggcctctataacccttacagcacctttgtgagaatcggaaatagacatctcttatcttggtggatgaattttgaagaaagcggcccctgcctcccctcttcccacccagctggctgcagccttgtaccagggcacaaggcttaacaaatagggtttgagctggctcttggccctcacttgctctctaggatggatatttttgagcagtacacaagctgcgcgactgtatatgatcaccctttgagatttatggtctagatttaggcttctgattggagatagtataagatgggaagcctttctgtgtcacccaactctgattgtcttatttacttacacaattctgttagccatatgttgctgttctttgcacaagaaaccagggactattactactggaggtcaggacctttataagcacattgtccacagttcccaaatgtcctgggccctgaacattgccatcacccaggagcttatcaaaacgctgatttctgtaccccaaaatcccattgtgtgtgatgtaggagctaggacagagtccaagaacctgcattttcataagctctccagttgcacaccacagatctaacccacttctagacaaggaaacagaagcccagagaggtttggtgacttgcccaggccatcccaaactggagaggagacctgagtttggcgatgttcagtgcaggcctcctctgactgtctgcccaccatgctgaacccagtcctctccaagctctcccatctctgacgatctccaaggccaggaacctggctctgtgccattttgtttacaaactgtgcttcctttagccatcaatgttttgtcccctcttagtgtattatcagtactttactgaagcataattcacatacagtaaaatgcattaatcttaagtgcacagcctgagggattttgacaaatgtttatacccctataatcattgccccagatccaagtaaaggtgatttccattgccccagaaggccatcagttgttctgaaaggacagaggcacctattgggggacagagatcacttctgtttgttccatgcgtgtgtctttgggttttctgtaatcttccttggaagggtgaggcctgcggatggggcagaggtggaggagcagtgggaacaatgtgtagccacatttctcaaacccagagcattgtcatgtgccagggcagaccaagctgccgggtaaaagtgctgcatcttcttggggtgttaacaccatttgaagatcgtgcaagaaaatctatctttatgttgaaatatagggatggatagagagcagaatgtaaaactcatttggatattgacgacaaaacattcaccttttagaaagtggggaaagtgggcttctcttaaccctacctctggatccccaagggtagcagtcttgctcctgccctgtcctagccttaaggagagtttgagaagtgccagtgtgtggcattcattgctgaagccattcagaggatcccatggtgttctgtgtgattgagatagggcctgggaatacagcctggacacccacaccatccacacactgggggtgacctgctgggaaggatgacagtactgtttcccctggagacttggcaggtggcgcatcctccaaaactctttgaagaatctacatttttaagacatgaagctgtggacagggacacttggcattttcatcccatccctaggaggggctagagcatccaagcactgcaatatactccagcctgaagaggttctctgggactttgttaaggggcattgaccactgttcccacctcccagggacagaatcggctcagagcgtttcagccgtcgacccagccactgagcacgcctgctactcacagatgtgcctccctttctgtttcatatagattcttttctgatgctttgttttcctgcctcaatttcataaatctttatagttgagttttaaaaaataacttgcaaatgttttccctttgggtgaactcttgcttctgtgtgttgtgatggtggcgatgctgattccaagagctaaatatgcgatgaggatgcctgtcgcaggggtggtggcctctgccctcacttttcctagagacatatttgtaagtgaaatgtcaaaggcatctttggttatttctaggttctacatatatttaacgagttttaaaatactcgtgccaaattgcccagcagaagataggttgcacatgttttcactaccgttagcggacagagagcacttgtttccccaacaatggcgatcagcattcctttccacacttttacttttttttttttttttttgagacagagactcgctctgttgcccaggctggagtgcagtggctcaatcttagctcaccacaacctccttgattcaagcgattctcctgtctcagcctcccaagtaactgggattacaggcgtatgccaccatgcccggctaattttcatatctttagtagagacaggatttcaccatgttggccaggctggtctcaaactcctgacctcaagtgatctgcccacctcggcctcccaaagtgctgggattataggcgtgagccaccacgcccggccttaaatttgatagatgtaaaattgtaccaaagtttcctttgcatttctttggttagtcactgcgaagatttttcaggaatttataacctgtttctgttgcttcctttataaatttgctttttatgctctgctcattttgctatttttgatgtatttatgtctttcttttattttagttagagtcttaatttatagggtacctccttagtttccagttttcaaaaaatattatctctacccagactcagaggcttggaacagattcactccaaagcggtatcaggccaccactcctacacagtgtctttgggaacattagaaaaactgcttcttccctgtctcatacagcaccatcctaagtttagggcttagtgagtggcacccaggtaagttcaacctgtcctgggtcccttagccaggctcccctgttcagaacacagctgtacaacctacacaacccactgtggccactctagtgttgtaaaaagtgaactaagccacattcttttttttttttttttttttaattgagacggagtcttgctctgttgctcagactggaatgccgtggcatgatctcagctcaccacaacctccacctctcaggttcaggcgattctcctgcctcagcctcctgagtagctggaactacaggtgcgcaccaccatgcccggctaatttttgtatttttagtagagatggggtttcactatgttggccaggctggtctcgaactcctgacctcatgatccatccacctcggcctcccagagtgctgggattacaggcatgagccaccgcgcctggctgccacttttaaaaataataacgaaaactccaagccattgagggtacaatttttaatacaattaaacctcccagctaccactgtgggcatcatggtgttctgcatggaatctgattttgcttggcattggtctggtctgtgctgtggcatgccggatagcagaggcctgggagggagttcagaggcctgggttctagtcctggctgtgttactaatgcatggcatgactgtgggcaagccagctttttggggcctcacttttctcatctgtaaaaggagaggctgtgactaagtaaacttccaggtcattctcagctctaaatatctgcaagttcgagttttagctgtatttttcttttttcccccaaaagattatgacacctgtaagacaggttagttttagattttttctttagcatctgggttatgaaaaacaaaatccattttgacgtttttgcattccatcaaatttctacctgatttatgctgttttacgtgtgtctgaaaagaggattacttacacacagccaatcgcctttctccattttaccaaaggcatcttggggtctgtggagtcactgagagaaggcatggatgtgcttgacagtgggaaaatgtggttaaattactctcttggctcatcccaccttttccttctctcctttctcagtaactgtttatggggcatctccccggggaggctcagaactgagcaacccttcgaggacctctgtgccttgtggggagccgggaattactgggaccctcctaagtggcagctccatgggcattcttccttgctcgcatcctcatggcctctcccacagaggacaccccccagcccactctccctgattccactttctctaccaccccaggcctttcatgctttccagcattccccagaacccattctctgtggcctgtcaaaggtggggtttcatcccagccacttctccacttgctctcttcctagaccctctggccctctcaggtggccctgcctggcacctgtgtgctccacaccaggcctgtcttctgagcccaatccagctcccacttggctgccttagggacctctggacctcagatgtctcagaccatgtggtcccaaatctagctcgcgatcctcatccacagtccctgtctggctttcctgtcacctagctgatcccccaaacacatggcatcctgcctctcctgacccctgcccccaccctccctgacctgtctgtcctgcccctgcccggctcgctccacatccgtccttccttctcctggctgcatcttctgaggtctggcctcctacagtctctcctgctcccagtcttcctttattgctttgatccaaatttaaaacaaagaacaccgctgtcctgtggcgggctccctgcgggagtcactgctgtctctttacccttccccatctcaggaggggcccaatgcaggcttgcgcagctgaactggacttatccttgatcaaggtcagacttttccctctgattgttctgccacctcctcagccacacagtggctgagggcaccggacttttccctttcccctccctctctacatgtacccggcgcccctgtctcccataatcctccagaggttaagtagatccaagacccttgggctgcatgtcggagcaaatccagcccaactttttaagaaaaccagggctctgggaaggggcaaatgctgggtcacgtcgttggaggtttgtggcagggactctcatgcctgcgtgtatgagtttcccaggactattgtcacgaattatcacaacctggggggcttaagacagcagaaactcattcttttagtcctggaggctggaagtccagaatgaaggtatctgtagggctgtttccttctgagggccgtcagggggagtctgttccagcttttctcctggctcgaggcagctcccaacagtccttggcatgttagggctggcagatccagggctatgccggtcccctgcctgcctccatcttcacatgtactctcctcttgtgtgtctgtgtccaaatttcccccttcttataaggaccccagtccctggattagggttccagtatgaccccatcctaacttgtttacatctataaagaccctatttccaaataaggccacattcacaggtcctagggactaggggtccaacatgccttttaggagggaggacacagctgagctaatgcagtgtggtccatgtcacttgtttttgtggtgctagagagggaccgtgaggtgtgggtcacactggttcaccttgtgggtggatttagctggcctttgaggttgaaagttctcagcattgtatttgtaagacctgtatcattaataaacattttgctagtcttggatgcttctttgtgtggggggagctgggagatggaggacagaggtcacctgggccatctttccaggtgagattatacatttcagcctagggtggggcagagccacctcacggaagcatcacttttattctttcactttttgtcattttcccctttggaaactaagcttgttcgtgctctgggacgtgcggtcatgcgtccctcactgctgggttgagctggtaggcctgcccctgctttcctttacaggcgagtgcctcgtgctgctgtttttctgattgctctggaagttcattgttgctctggccctcctgacctgtgtctggcctttgcccatgtgcagagtttgtggatcagcatttcaggggtgcgggggcgtggtggtatgcgagtccatagccgtggaagtttgggacccaagcctcatgaggcagaagcctggctctggggctccatatttagtctggaatccagcctcagctgctgctctggggccacactggatgccagaaagggcagaacactggcccggagccagagctaggacagcagggcctgctgtgcagcgcagctggtgcccaaggggcatggaccttgctgggcctgcccggaactggcctgcccctgcctttgtgtcaaccaggaggcctgtgggaaagggggctgggaagaaagtgagcaaacacctcagaattggaaggatcagaactggacagggcctcggagtgacatagtccagtgcaccctttctgcagagaagaaagactggggtggcccagggcggtgacttgcccaaggtcacacagttaatggcagagccactagatttgggcttctggacatcaaatcctttgcccttccctggaaccatgctgcccaggaggccaggccgttatcagggtgggactccctccaggcaccaccttcgccagagaccagaagaggatggccacaccctcgggagcacgcaaattgggaaaaagcagacatccatttcggatgacttcctgcccctctttctgtactacttcccaggctccactggcttctgccactcctcaccctccaccccgcccccaccactgagacctgcttattatgttagtcatttaccccatagtgtgaatatcagtcctctcccagaggaacttggacaacagccatggagtgagagttggagtcagccagacacagccagacacagcattacgggacatgttgcaaggtgcatatggactgaaacaggcagatctcagaaatggaggaagcccctgggacctgctctctcaggaagggaaggccagggagagctatttccaaaccaacctgggaagtgtgggaagatgctcctagcacgtctcagctcctgtctagtgactgatccatctcccttgtccatggagactggctgacccatctcatgttctatagctcagatctactcaggaggcagtccgatggcctcactcattataattaccctgactcttctaaggcagtcttcccatcaccccaccttgtgggtcccaggctggctgtggatgggccaccctctgatgtggtacccaccgctccaggcaatggctgcccacaaggacagaacaggctggcctggagctctgagcaggacacatgggagaagacagactcagcatcaagaaaaggtcaacaccagcctggcaggtccctggccccacgtccagtatgtgcccttacctgctgtgtgaccttggtgtctgaacctttctgagcctcagtttcctcatttctagggatccattcttcagattagaggcagaactgaagagagtgcagctaaaggcttagctcccagtagccactcacatagctatcattgtggtgcgcatttcctcatgcaaccctggcaggtaggcagggccagtacttgtaaccccattttacagacttggaaattgatagttagagtaagtaatggacctacccagccctttgcatttctggtgctgcactttttcttttcttttcttttttcttagagacagggtctcgctctgtggcccaggctggggtgcagtagcacaatcatagctcattgtagcctccagctcctgggctcaagcaatcctcccacctcagcctcctaagcagctggtactgcaggcatgcaccaccatgcccagctagtttaaaaattctttttttgtagagatgggatctcactttgctgccccagctggtctcaagttcctggctgcaagtgatcctcctgcctctgcttcggaaagcgctgggattacaggtgtgagccactatgcctggtcagtgctgtgctttttctactgaaacaccccggtattatctgtgggttttaggagcagttctcacccttgacccaattaacctagataccagtgaataccttattgtaaagctctctagctgccgagagaccccagcttcctgggttggtttgaaaatagctctcctggctgggtgcagtggctcacacctacctgtaatcccagcactttgggagactgaggtgggcggatcaactgaggttgggagtttgagaccagcctgaccaacatggagaaacctactaaaaactacaaaattagctgggtgtggtggcgcatgcctgtaatcccagctactcgggaggctgaggcaagagaatcgcttgaacccaggaggcagaggttgtggtgagccgagattgcgccattgaactccagcttggggaacaagagtgaaaccctgtctcaaaaaaaaaaaaaaaagaaaaagaaaaagaaaacagctctccctggccttccgttcccatgtgggcaaggagtggatgctggggcttggcctcatgggagaagctgtgcgtgggcaaccactcaagtgcagtgagtggattaataaccagcgcgagcctgcctcggccactgtcattcccatgacacgcaacttttgtcattgttaacagttggagactgtgtgcaggcctctgcctggcagtgctgaggatagcgattagcagggagtggcggggactaatcgctctcatcagccgggaagaatccaagcctgcctgccgttcacaggtggcctttagctccttgggccccagggaaagaggaacaaagggaatcgctgcaaaacatctgggggcttcctcttgttccggagaggcaggctgccgcggatcagggaatggaggcagcggggatctgggaggcccagaagcagtggaaccacagctgggctggtgtctatacagcccatgtcctgccttcagatgagcaggaacatttttagaggatgcctgtgaagttttctcctgttcctctcaccctgggcatcatcagggggctctgtatctggtgggagcatggcagcattcaaggtgcaggaggaagctcaggcggagattccctctggtcagtgtacagttggcagaaatgcccgggagaccctcagctggggaacgcacccaagatggagagcaggggcgtcaacacctccgctgggattcttaagacttcgcagaaaagggcaagtttgtagtgcatttgaaggacttggttgaattaaagcaaaattatcctcattattgtcatcattattgatattaataatatgtaactagaaatcttttttttttcttttttttttttgagacggactctcgctctgtcgcccaggccagagtgcagtggcgcgatctcggctcactgcaagctctgcctcccgggttcatgccattctcctgcctccgcctccccgagtagctgggactacaggcgcctgccacaatgcccggctaatttttttgtatttttagtagagacggggtttcaccgtattagccaggatggtctcgatctcctgacctcgtgatccgcccgcctcagcctcccaaagtgctgggattacaggtgtgagccaccacacccggccaattcgaattcttttgtattttaaagctgacttttatgttcttaaactctgggaggttttttgtttgtttttttttttaagatattattcttatttatagatataggaatgaggcctatagatgaaggtggctggctgaggtgagcaggccaaggtgaggatatacctttgcctcaggtggggttagggccaggcccagtgatgctgggaacccattcagatccttttctttcagaatatctggcatttagttatgcactgtgtgatagaggctcctgaacaatttcttagaggactgtttcctatcaaccagatgacatggaccaaagaggtgaatttttacctctcctgtgccacagatccctcctatgaacacaagccccccctcctatctgcccccttcccccactcctgcaatgtgcagcagacagtttctttggtgtcgtgaactgtggctgcagtctggcctacccttttccggcgggtcctgggggatgccttgctcaccggctggcttcctgagcctgcaccccatgcggatgcacggggtcccacactcagaagggttcatgtttggttaatactccatagtcactgttttgaaatttttattttgagcaagaagcccttcattcttccccacccccaccccaccccgccccaactgggcctcgaaaattatatagccagtcctgcttgctccaggccccacagttgttgaagcatggatctgtgctcctgactgccacgtggcaggtctgtgagctggcctaatggctatggagtagccggcagaggcccaggggctgaggcctgagctgtttgtggggcctggcatttagggcagcgtagggatttctggaatgagtcctcacacattctccagccaccactttccaaccctccctccatcccggcctctgccccttccctcctcacttggaaacaccaggtgcacgttgtgaccttgttggcaaaaagcaaggtgccggaaatccatgcacccacagcagataactgtccccctcctgtgcccatcctgaagctggcccaatctgagctccccacaggagtttatttttgatagatcgagaagactagaactatccaaggaacgagaactgccccgcttgggcctcctcctcacctggtgcgttcagtcaggctgcagcatgccctgaggatgtgctgcaagtccctggggccaggctgagagagctgaggcccttgtcttgatgaactgcaggagttgctgtcagggcctgctgggccctgaaggcctccagtctgccaagagggaggtggccgtgagctgagtggtgccaagtctccggtgccaggcattggaaaggtcatcttgacatccgtcttcccttccctgtctcgaagcatcaagtcacaatgaacaaaagaatcagcactaagcaggcatgaggaaatggacccccgagcctggccacccaagggatggggtcaggggacctggcacctgggcttcttgtggcctatccttgggtaagtcataggattctaggattttaaaggtggcaggcaccttagagctcacccagcccagcctcttatccagacgaggggactgagagcaaaggggagagtgggagcggctcccttccaggtctcagttaggattaggattgttggttgtgctgtctattgctgtgtaataaattacccctcaaattaccccaaaacttagctgaaactacgtacatttattttttaattaattaattttttttagagagacagggtctcagtctgtcacccaggctggagtgcagtggtgtgatcacagctcactgcagcttcaacctcccagtctcaagtaatcctcctgcctcagcctcccaaatggctgggaccagcggtgcacaccaccacactaggctaatattttatttttttgtagggttggggtctctgtatgttgcccatgctggtctcgaactcctggactcaagcgatcctcccacattggtctcccaaagtgctgtgcccagccttaaactacatacatttgttatttcatggtttatgctggtaaagaattggagctctgcttagctgaatcccttgctctgggatctctccgaggctgcaatcaaggtgtcagctgaggcaatattcaactgcgggaagagccacttccaagctcatgtgtgtgggtggtgacaggattcagttccttgcagcctgttggactgagttgtccacagttcctctccagcatggcagctggttcatcaaatcgtgcaagctgaggaggcagtagagtcaacaaggtggcagtcatggtcttttgtaactgaatcacagaagtgacatcctatcacctttgtcatactctatttgttagaagcaagtcaccaggttcagcctacagtcaagggaggagattacacagatcatgaatgggaggaggcaaggattattcaacaccatcttagaaagctgcttaccacggtgacatagaacagaaaatccaaagaacagaggtttaaacaacatactcctttatttctttcttacgtctacaggcaggcagctcaggcctcgtgtgagggctctgtgatcacaggggcccaagctctttctatctttctgctttgccctgtgtaatagttgaccgctatcttcaaagttgtctcatggcccaagagagttgctggaactccattcatcacatccacaatccagacaagaaagagaaagtgggaagagcaaaaggcatgtgccaatggaatcagtcccttttccttttcttttctttctttctttttttttttttctttttgggagacagagtcttgctctgtcacccaggctggaatgcagtggcgggaccttggctcactacctctgcctcccgggttcaaacgattctcctgcctcagcctcccgagtagctgggacaacaggtgtgtgctaacacacctggctaattttttgtattttagtagagattgggtttcactgtgttagccaggatggtctccatcttctgatcttgtgatccgcccacctcggcctcccaaagtgctgggattacaggcgtgagccaccgcacatgtctggaatcagttcctttaaagggttcagtaacttccctttacacctcattggtcactcctatctgtgagggaggctgcaaaatgtagtttttctctaggtacattttctcccccagtgttataaggattctgttaataaggaaggagagaatggattttccagattcaactagcagtgactgctgtttttaatggctcctcaacctgaaggtgtaaagccatatcttccacctccactgcatcatgtgggccctgccccaaattcctggtctcctggggatgctgagtgggtggaataaggggcaaatgttggaggataaagttctagtgcaacataggatagaacagtgaacgaagaagtgtaacatcaactggcctcttcgttcactgcctcattcatttatcatcgatttgctgactgcctaccttgcatgaggcagcaggaaaaggaggaagacatagagttaagggaaccacagcctccagtgggagacagacctgtgactggatagatgaccagtcagctaacagtcaccagaaagccagccctgggaaggaaggcatgcaggctgggacttgaagggtagtgatatgtgttgaatatgtgtcccctctcaatctcatgttgaaatatgatctccagtgttggaggtggggcctggtgggaggtgtttggatcatggagatggatccttcatgaatggcttggtgccatccccttggtgataagcgaactctctccctgagttcacgtgagacctggtttaaaagtgtgtggtaccctccccccgccccacccctgccttgctcctgccctggccatgtgacgtgcctgctttcactttgccttctgccatgagtgaaagctccctgaagcctccccagcagccaagtagatgctggtgcaatgcttgtacagcctgcagaaccatgaaccaatgaagccttttttctttataaattacccagcctcaggtattcctttatagcaatgtgagaatggcctaacacaggtggatagcagttgtctgggcagaatgggctgaggaagcagcctgtgtgctggcatgcagctccagccctcttgtctggaggagggccaacgctgggtgttctcttttccagcctgagaacttggctgtttcagatgaggagacccagtggccagtgcaggggacggatctctgcctgcagcagggcctaggatggagcctctatcaccctctattccaatgccctttcagcctttccagctcatcttctggctgcggcaccctgaagccaaacccttagacttccagtgggcctgcagtaagctccagactctgaaacagtgggtagatggcctgggtgggcagggaaaccccagctgagggtaatggggagttggcggaggctctgatggtcttaccagggctccagatttttcctacttggcaacctaaggaacatcacaggcatcccctgaaccatagttgctttataagtcacaaacgaacaatcaaaaccacctaacttagcctgtgaacttctgctcattcatatttaagttttcagaggctcagcctgaaggaagttggaagtgtgctgtcattagcaaggagagaaggtgtggcaggcacctctccgctctgaggccaaggtagcaccttccaaggatgctcaggagtgcatgaagcctgtcctgcctccagcaatacacagactcagaatatatgcagcagggcctgctgaggttgaggggagccagcaataagctcatggcaggtatcatctctgtgcatttaaaatttaaggtcagaacttgggaaccctttggtatttgccagccagaaggatctgcagctcagagggccatgaaacggtgaaacggcatggtggtgtgggcgggcaggctcctgtacttaccattgtggtcaacagagagggttctataacagcacgcagggcaagaatgagcatgatagcaccaataaggacatcagcatttcttgaatgtagtgaagtattcagcatgggccaaaagtactttatggggactatcttccttgcaagagacccagaacggagacactgtgattagtctccacctccaaccccagcctttttcctggagaaagggcaggggacaatcccagcaagactctttctcacccctgcccctatacgagtggagcagattccagattcaatagtggtgcatggagtgatcaatggataggatgccgccacctttgacctgaagactttagacctctctgcgtgggaggactgcccacccgacgggggcctgagagctttaacagagcagaaaatctcctctctgccgatcagctcatgggtgttggaaaggcctggcgaactgtaaagcagtgttgctggaggagtctgagcagatggttctattggcccagggtgtggccggggcctcacactgataggcatgccctccgtatgtccagcatgtgaccggatctgaaaggacacagactcctcagaaccagtgttctagccaggggggtcaacagccaacctttacatttttcctcttaaaggtttttttttttcttgttcataaaaatgccaaaatctcattttggggagataaaaagaaaatacagaaacagcaaaaggagaaaagttagtcctaataccacctctgaaagatgtctttggatatttgtagtttacagtcctatttctatgtattttcatgtagttgagatttcagggtctattaaaaattgtgttttctttcctacatatcatggtgtcatgagcaatcccgggttattacagcccttcgtaaacaattcctgagggctgaataagctagcaagccatgtctgtagctgagtgtgggcacgtcttagtgcccaccagactgtccccctcatgccagcaccttcctgctcagctggcctctgcactgcccatgtccacaggcacctggctgtgctcacaggatccagaggattagaaggagatctcctctagcgacagggtgggtaccatgtgctggagttaggaggcgaaagggtgacccctgtgtcttgcgtagatggacaaggcccccagtgtgatgtgatgagccctaacagagggtgccgtgacccagccttacctggcctgtcacggggcttccctgagccagcccagtgacctcaaagctttcctacctgtgacaccctccaagtggccaatccactttgagggtgtgaggtgagaagggacaactcacctagctgccaaccaatgtgtctaataatctccatgcctctgattcctcactgtcaattggagagactaatagcatgcaccccatggggttgagagcactaaaagcaatcaaacctgagtgtgtgcagagtctgcccccaacccccgaggcatgcaatagatgcgccccatcattgcttgcttctagggagctcccagggtggggagctggggctgacacaggaagtaacaagagtgacttggcgctggggagactgaggcctcaagagttcaggaacttcctgaaggtcatgtggcggtggcgatgagctccgaagcctgtgtctgtatgtgcttcatttgtgtgtcactccccatgggcacctttgtaactgttgtgtttttaattttctgtcagttggagcaagcagatgtggctctgggcaggatttcctatgctgtccttgtcacttcatactctgtcttctcccttgccactctggggatgtccttgagcagagcccatctctcattcgccttggtatcccaaggtctagcacagtgcctggcagacactgaggaagtgacaggcgtttgttgcgctttgagtcaaggacagagccagagcaaaggctactgggtgagctgaagggatatttcttctgagctctgatatctcggtgtccccagctctgttcttggcttgtcactataaatcagactggaatgctggggtttttcctggcagtctctccatcccctctcctgaatagtgctggatgagatagacaaattcttcattatcttttgcagccaaaccagttcttccctttccctgcaatattcccagccagccctgagtagcctcctgctacatcaatcccagtgcagcctgtctcatactggtgacattttacattggcatgtccctggtgagaatgttaagctcgttgaaatctgagaggcgcctccttgctctctcagccacgtagacactgtgtttccttaggccactgctctcctacgtgttgggtagacacatttccaatttggatgatggtcctttcaggctttggtctggcctgcggagaagggtatctcagctcagctgaactgagatctgccctcaccactaaggtgttaggcccgttctttatctagctataggaaaagtaaaaagagcttttgtagaagcaaagaggacctgatcgtgttaatctgtgttaatttcaagggtccagcccggcgattccaggctcccaaaagaaaaatgtgttttcccccaccttgatctactgctctgtgaggtagatgtactgaccgcatgtttagacactgagaatcaatttagcagccttctgatctctatatattctgtgcgtgcacaacaggaataatgatttttaacactgggtttggcaagggcgttgccagactttctcataggcgatctgatgggaaagctgtccccccgagggtccttcctgtagggagagttatatgagtctgagaaaacatctggccagcctcatctgtaaacatggcacaatattattgaatgacagcctggggaccagcctgtggggagtggaaatgcagtctcaggacagctataaactaatggtctttctttgcttactgacacattgaagcagggttctgagatggcattgagacaagggcccccatcacccaccctcactggcttcttggaccaagactgcatatactgatatgttcaactcactgtcttgtatgctctaaaacacttttgttttgaagcaagaaaatggaagacaagcttagggatggcagtttcctggaggcagcctgagggatgagaaataaaagacattggcacaaatctcaggaagcaagaattttagtccaggctctgggatttggggtgtgtcatatcatagctctgtgggtatgtttcctcacctataatatgaagaattggcttgctcgtttcactgatgctaggaggcatgttcatttcacatcttaatgtttcttaaatcaggctgcatcttactatcgctggcatagcacccttgctgttgccagatgacaggcaggacatagtcgtcatggcctgagcctgtgtgaacatgggcctactgttcatagtgtcacatcctccattaaaagaggtttgttgttgattagccatgtattgagtatgaatgtcgttaaaggtgtctacaaaagggtctcatcatgatttattagcagaagggccagaagacagagcagtggggcaccaatttaatattagagaagcaaatattgttggaggaaagactgcaatctcataaaacagtaagaattgtcagtctcatgcatgctaaacaatgccacgaaaggtggaagaaattgccagaagttgactcagaagagatgaaacagtctcagagccaggtgaggcctgcgtgagcaatttgtctacatgtaagactatcatgaaggcattatggcatagcttaattgacagcatattttctctgtggttcataaaataatggtgagccttacagttgatgactttgctttctaagatctcttctagttctaatgtctaatagttgtgttttcatttttctgtcaagtggagcaagcagatcaaaaataacgtttttggtgtttctctcctatgttggtgctgcttctctgggcccctgtagcacttgacccttgatgtcataactgtgtgatcgcttctctgcccttcgttttgtgtccgtaacattcaataccaagcttgagttagtgttttttaaatggacatatgggtggatggatgggtgggtgaacgaatggatgaatgggtggatgaatggatggatggatggatgaatggatggatggatggatggatggatggatggatggatggataagaatgggtggatggatgggtggatggctagacaggtgggtgggtgaatggacagttagatgagtggatggatggatggatgaatgggtagatgaatggatgggtggatgaatgaatgggtagatgaatagatgggtggatggatggatagatggatgtatggatggataagaatgggtggatggatggatggatggatggctagatgggtgggtgggtgaatggatggatgaatggatggctagatagtggatggatggatggatggatggatggttggatggatagatgggtgggtggataggtgggtggatggacagatggatgaatgggtgggtgggtagattgatggatggatgaatggatggatggatgcagggcaggtgggtggaccgatgggtgggtggatggatgggtagatggatggttggatggatacatgaatgggtggattgggatggacggctagataggtgggtagatggatggatggatggatggatggatatgtgaatgagtggattgatggatggatggctannnnnnnnnnnnnnnnnnnnnnnnnnnnnnnnnnnnnnnnnnnnnnnnnnnnnnnnnnnnnnnnnnnnnnnnnnnnnnnnnnnnnnnnnnnnnnnnnnnnnnnnnnnnnnnnnnnnnnnnnnnnnnnnnnnnnnnnnnnnnnnnnnnnnnnnnnnnnnnnnnnnnnnnnnnnnnnnnnnnnnnnnnnnnnnnnnnnnnnnnnnnnnnnnnnnnnnnnnnnnnnnnnnnnnnnnnnnnnnnnnnnatggatggatggatgaatggatgaatggtgggtaggtgggtggattgctgggtggatggatggatgaatagaatagatgggtggctggcttgctggctggctggagctgcaccatgagatgcatcctcatctttggtgaggcaacagatacccttccaggaagcttcaaacaagttctccagattcagtgggagcctagactcagtgaaatttttttttttttttttttgagatggagtctcactgttgcccaggctggagagcagaggcgcaatcttggctcactgcaacctccgcctcccagattcaagcaattctcctgcctcagcctctcgagtagctgggactacaggcacatgccgccatgcctggctaatttttgtattttagtagagatggggtttcaccatgttgcccatgagctgaactcctgagctcaggcaatctgcccacctcggcctcccaaagtgttgggattacaggtgtgaaccaccacaccccgctgactccgtgattttttttttaagggtttttttttttttttttttttttttttgagacgggtctcgctctgttccccagggctggagtgcagtggtgtgatcttggctcactgcaagctctgccttctggattcaggccattctcctgcctcagcctcccgattagctgggactacaggcgcctgccaccatgcctgcctaattttttgtatatttttagtagagacggggtttcacagtgttagccaggatggtctcgatctcctgaccttgtgatctgcccacctcggcctcccaaagtgctgggattacaggcgtgagcccctgcgcccggcgttttaaggcttgtcattgatgttcttttattcatttggtcctagatgattctaacaactatggtttttttggagaggcctccaagctactaagccagagattccaacccaagtcaataatcatggggccaatccatgtacattacttttttaacagctttattcagattcgatttatatattttataatttacacatttaaaatatacaattaaatggttttcagtctaattatagatatgtgtgacctttaccaccttcatcacctctaaaagaaaccctttagctatcacccccttgtctccctgcctccttcctgcctcagttgtaagcaaacaccattctactttttgtctctctagatgtgtctattctggacatttcatattaatgaaatcttatgtgatcttctgtgactggcttctttcatttagctttgtattttcaaggttcatccatgtggtagcgtggatcagtactttattccttctaatggctgagtaatattccattgcatgcatagttcatattttgttatccagtcatcagttgatggatgtttgtgtagattttaccttttggctattattaataatggtactaaaaacatttgtgtgcaagtttttatgtagacatgtgttttcatttttctcaggtatatacctggagtggaattgttgggtcataaggtttatgtttaatggttcaagaaattgcaaaccattccatatggttttccacagcagctgcaccatctgacattcccatgagcagtgtttgaggactccagttgctccacatcctctccaacacttgactcgatactttgtaaggtctttttacttctaagcttctaggattctgggtgaaatccagtgacagttgaggctatgggaggctcctttctggccttatatcccctccttctccatgtctcagtgtagtttgcagatggctgtgggggatttctcagttaattatctgccagttaaccactcagcctgctccctgcggttgtatctggctacagacttctcctgctgtgtgtgtgaagaggttatctgctgctaccatgctctagtgggtgaaattaaccacagaaataatgggaagtagagaccaaagactctgatggactaattagaacagccatcaggagctgccccctgtgggctctctgctgcaaggcatctggctgcacctgggagtccttcctcactgcagctgtcccagactagcctgtgggaggagctcttaggtcacagaggcccaccatgggcctctcggagggagcccacagtcctcccttccggcttctgttgattgcccacttcataccaggtcctggaaatacaatgatgggaaaaacgaaaaggtccctgttctcaagcacgcacactagagtgggttcctgatggaattaactggaacttagatttttctggctgcctgttttcccaattacttgatcatgttccagagagaagtaactggggaaaccaaccctaggaaaccatacctgaaccttctatgtggccttggccaagaggtcttgtctctggcttggcaatctgttgtgggaggcctctgtaatcgggctttatgttctacaaggtagtggatatggcttgcaaatatgtgtggcctgcagagcttggctttctcataccctctaaccagaagaagcctttgcagctcaaaaggactgcacctgtctcatccgtccctttcccccttcctcagagctcctaccctatctcagctcaacctgggggcaacgttcagtgactcattggttcatgccacaaggagtgggaatctgagatattgctagtccagggcaaatgctcaggattggagtcagatgcctgggtcatcatcctgccctgtcactgggccactggcatactgttccagggtccccatatgggagggtaacagggggtggtgatgcatgctctgcctaactgcagccgcagggttattaagagctgactggcaggaaggacaatgctgagctgtgcagactccaggggcatgaggcccagtgccaccctccagacctccctaaatgacttcggactccctggagagtacataacttctggcaccctggacaggacccaaaggcttgatctggagcagtttccaatgcccactccaggagggacgacagggtctagcagcttatgggggatgttgggcaagggctggcacattgagggagtggagctctgggaccctcactctctttggtcagagtatccatgtcttggagccattctgtccaggtttcagttctgagccagcctcttcctagccaggtgaccttgagcaacccttcgtgtcctcagtttcctaatttgtacaagggggacaaaaataatgcctacattataggatgatcttgaggattaaattaatatatgacaagcatttagcacaggggccggcacatactaaattctcaataaacacaggtatttattatcttttatatatttggggggagtcgtttataatttcatttgaaaaacaagtatgatattagaggaaaatagtttggaaaccaacaatctgtggggaatacaatattgatgatttgctttcctgctttaggaaaggtcaaagggcagctgcctttgagcaggagtttccctccctcgggtcctccaagcaaaggcagaggcagctgtgctgtgttgtctctgggcctggaggccactccaggaatcaggggccctgggcttttgctgccgatttctttgcctccctgtggttcgtagagaattcagggagagctgtaagagcgctgggcaccggatcaagtctgagattcctgtggttgctgtccagcatgcttcaggcattgtgtgggatacatgagggctccctggcagaagaggggcctgccctctgacacccaagctgtgtctgctgggtccacttgtaatgtgccacccatctgtgcccatcagcagccgtctgctaataccaaggtgggcagagcatttgttacctgctgctgaccattttctactttctgggaatccatcatgaaactgtcaaaaagaggaactgaatgtctatggtgaggtcagctcaggctcccagggtccaaggaaaggagcagacaggtcctcagcctccaggagctcatagtttagctggggaaggaggcagccactcagctcacattaaggctgagctggagggtggtgggggcattacaggagcagtgggacatccctgggctgtcctttcctcccttgagacactgagcaggagcaccctgtccctaggaggagcttgggtatgcacagccgagtttctgctgagtgacaccatcttctataatagctgtggctatcttcagccaggttatggttgagtactgctggtctggagcctttttttctttctgcttgcaatgaccttgcatatttctgttttggacctggactatcatgtattatttcacagtgtaactcccaagggcaatccttcgtcctgatttatttccaagttctgagggggagccctcatttttgtaggcatagaccacttccagttagttgctctttcgcaggggactttcgaactcggatgccttacaggggccaggcaggtaacatgtgtgagtgagggagccaggtgagagtgaggctgtgagcagcggggaggcattagagagtgtatgggtctgcagagaactggggttgattgcctggtctgaaggggacagcacttcttagctctagctgatggttacagcgcaagaaggtgggccagtgttgctcgatcatccagttttttcaagaaaagtcagaaattgtggctttttatgtgaaatattttgatttataaacgttagctcaaatatttttaaaatatctaactggctaaccagaacacaccatggtccagacgtggccccagcacaggcggtagcaatctctgctttgtgactgtgctccttgcaggacaaggcggtcatcgaaagtggtgggggggtgggggcaggcagaagcccaagggcccagtgagtggctgctatgagcattctgaggggtctctgtgacctgggccggtcagggtggcatctaagaggtgggcttgagctgttcttgaggatgagtagagagaaagggttgctgttctcgaacgtgagccagttctgccttgcaaccatagcacaagaccacctggacaggcctgcaaggccacagcctgctgagatctagcctgtgcacagcctgttctgggctgtggacactcccaccaggctctggaaacagctcggtactctctctgctccagctggtctgtagttcagggagctgttgccaagagggagaaagctgactggggaccctggaaaccccaagacagatgccagagagaacgttgcctgagaaggaaggcctggagcgctgctgccaccacacttggatgccctttctagccttaccccaggtgcttgtggacacattgctgggttcagagcagggcactattggtttcccttcctagcatgctccaagttaattttcattcttggccaataaacccagaagcttttgacagctggtggtggggctcacccatctaccttcagagtccacagaagagagaatggatctctgtgagttcctgcaggttggcaaaacaggtcaacccagggattggaatacaggagagagccagactgaggcccaaggaggactcagggtgttcagagttgggaggcattagggagtggtgagatctgcagagatctggggttcagagatagcagtcgtcattgatatccagagtagtcaaggagggcttcagggaggaggtgtgcccagaggtgggccttgagggaaaaggggagatttggagaggcagaggtaggagagaatgcagaagacagagtgaggtatagcagttgtgaagtcgagtgacaattgcaactgataattgagtgcttgatgtatgcctagcggtgttgagcacttttctcattcattctttcacatgattctcacagcacctcatgaggtggcactttcaccatcagcctactttaaacatgaggaagcaggcccagagtccgcccaacagcacgcagagaaaaggtgatttagccagcactggaacccagactcgggacccataagcatgatgtcaccctattttacgagtgggggcagtgaggaagccacctgactccagccagggatatggctgtccagctgtctggtggccctgcacagttttggtttgtttcagctatgacttccctgtccctggtgcctctagggtgtatacagcagatgctcagtatgtcttagttgggaagagttgtctcgaggaggctcttgaatgtcatgggaagaggtttggagtcctggttctgggactgggtgaccttgagggtgtggggggctggagcaagtcaactcccagcatccattggctttaacattctaggagctgggagtggggctggaggaaagcccgggcccattggcagtgggcggaagagctgaggaggcccactctgagggaaggacggtgctggagagggcgtgggcgggctgggggagccacaggcccgtctacccattctgggcctgcaatggaagcaggtgtaggatggagcagggccctcaaggattacgcagtcttatcaataccaggcaaaaacctataaaaaaaattcaagagcagggcaagagttgggtagcagcccagaggcggaggagaaggtgtcaccaggcagcctgggtttggtgccaagggagcaggtgggtggtcagtgctggagcccagtggaggcttctatgggctttgggggcagacctggaaacaggggcacccagggataaagcaggacctgcacgtcacagagcccacctggatgcccacctggatgcccacctggatgcccacctggatgcccacctggatgcccccctcccgcctattgggctaggcctacctgcccgggtgggttgctgtttcagtgttcttcctccgagaggaagtgctcatcaggagccaggaatctaatgaggcaccccccggggactgaggcctgtaccttccacactcctgcgggctgctctcccttcctccctctccagggcctccgatctcagcccccattctgggtgccagcactgcaggcctgctgagcaggaaagaatccatggcatctcccttgccttccggccagccatgccctgcccacctcatgaaaactggtccagctcctcagtgactcatggaggctactcttggggacagaggagtaagtgccaagccccagctctgtttccatgaagttctgatgagaccacagggcttggtccagggctttgcacagggtgggggctcaggagggtatgaggacaatgggatgattttggtgtcatctgttatttaggagtatctgtcatgtcactaactgcctgatgttgatgattgtaacccagaactgcgcttggggtccacagagcttaggagtcactaagggaaggaaggtgactctcagcaggggtccctggagaaggcaggctgttgagggatgtaaaggcttggatcctgcattgcagcctggctctacccatagatacctgagtggctcccagtacgtcattcccccttcagcccccaaggtcccagtgtcctcacctgcgtggcagcagctgaagagctgttgagggcaggcagcatagatatcaggaactacctccaacttgttcagacctggcagatgtgcctgagctccatgctgggtgttgcaggactgtaagcaggtgctgtcatgtcatgcgcctggccctgagagtccagtgtggaggtggtggccccagtgtccactgatcataataacctgtggaggtcatgcctggttctgagctccgccctgggccctgcgtgggccataagaggagccgccccttcaccagatagctgaccagctggccagaagtttggcctggggactccacccatttctagccctctggccagagcaagagtatctgaataatggataaagaagacgtgcaagattttctagatcttgtctatttcaagtgtagttctctgactggcagcagcagcctcacctgggagcgtgttaggaatgctgagtctcaggccccaactcccatccttgaaccagaatctgcattgtaacaagatgccctgtgattgtcgtactcattaaagtttcggaagcagtgctcccggccaatatgtttttcatgggtaggtgaaacaaaagtcccacaaattgatagttacaatgtgtgctacatgctgatattttcaatttagttatacattttttaatgctgagatcgtgacccaggaaatttgttttgcagctcatgaaattgctgagacctgcagtttgaacaccaccatgctagctaacaccctgttggatgtttgagtgacaaaagggttaatttggtggggtgacaggggatcagacgtttagaggacgtcagatgtccttgactcctgtgacagaaaatgttgccaatttccaaggtcacatgccttcgacttcatgcatttctgaactttcccatttcccaggggttggggacctggggctcctgcacatggaggcctctgcttcctcctgcttttctttggcaaacaccaacatggttgaattatcaggccagagcttgagggccgcagactgtcggggaagtacattctcgctggagtcttgaaggggagtgtgggctggactggggctggagggacgcggttggcagtgagcaggctcccatggcttcctcggggagagcctgggcaccctggcctctctcctccccactccagcaggcagcatggcctctggactggccctgccctgggggccacctgacagcctgcaagggagaattctagccccaattgtgcattctgggtgaaggtgttgctcccactctgtggggatgggaaggagagaggggatggaggggaccagggcccgaaagccagcagccagctctgcctataatagtcaccaggagctgcttgctggagagcaacctgggagcacagtgctttgcagcaccaggtgacatgggaagcggccacaggaaggtggggtgaagacgccagtggctgtgatgagtggatttagcagcaggagagcagggacaacactctgggccccattgcccaccacagctccgatgccacctccactgcagacttgctgttctgctgggacgagtggacagacctgtgagccccaaggctgctgatcttacggtcaccaagcaagccccctgcagccccacctgggccccctgcagcgggcctgggttccacaggaggctggaccccttgctgcagccacaagccaaaagatgagccaggaagcagaaattggggtcttcctgggtttcctcagtggggtgtcagaagggtgtgctgctggagtgagttgggtgctgggggtggagaggaaagagcctgaagaagtgtggggtgcagtgctgcctctgtgcgggcctcgaatgatggattccctgagaagtgctggtaggccctggagcagatgcatttcatctggtttgcaggtcactgaactcatccctgaggattggaggaggaggtaatgcccctaatgcctcgcagttcttaaaaggattggctaaattgatagctcctcatgccatttgtcactgggtgggcaggaaaggatactgagaaggctgggatggctccactgattgtctctagcctgtgggtgctctccaatgtcagccttaccttttcctccagacctcctgcctctgaaggtcagactcaaagtcagacttggccaggggttagagggagagactggcaaccgaccatctcaggctgccccacggtgttcacagaaaccccttccagaacactagtttcctaaggaagctacagagtgctgggctgagagcagcaagggatggggaggaaggggaggaaggcgaaggggagtttgtttgcgtctagggtggggaggggacgctagtgtggagagaggcacctttttgtcaaagaacatgggtgattttcatttttgtccttaaaaatagccaggctaactgggccgttgtgacaagcacggactgtgattggctgcagcaggaggtggggagtccctgggctggcggccgagtctggatgaggttgtttaacagagatgcagacccaggaagagagcctgcatgcatccctttccccagacagacacagatgtggccaagcttggcggccctgggtcctctctgggaagcacaggcgaaggagctctggggcaggtcctgctgcagcccgggccctctgtgtcctccagaaagccgtgcccacaccggccctcccctccagctgtagactcagggctgcccgcccctgtggtgccctttacagcaaagtgcaacctcagcatttttcctactcctgctgcttgccttttagttcctcctcatccatcacctggcagggaatcggagcagagccgggagaggaggggagaggcgtgtcttttgtgttcttctaccttccctcttttccttttccttctgcctctggttccatcctttcttgactttcactgatcattaaaacataaattcctggctggctctctcagcttagccagcagcccagctgtttggggacttcccatcaggatcctactgggaatgagacactgagccaggctgaaacccccaaagctcaggcaggaaggcagcaaaacaagcctggaggagaccatcccttgccctgtgtctccaccagccagagaaagctctacccttttcctccacactcgtcttgccttaaaaatgtgttggaacttttctaggtggataccccaaagaataaacagggactcagagggatcgttgtacactcatattcaaagcagcattattcacaacagcaaaaggtgcaaacaacccaaatgcccatcagtggatgaatggataaataaaatatggtctagatatgcagtgtactattgtgatacgatgtcttattcagccataaaggggcatgaaattctgatacatgttacaatgtagataaaccttgaaagcattatgctaagtgaaataaatcggttgtaaaaggacaaatattgcatgattcctcttataggaggtacctggaataggcaaattcatagagagaagggtgaggaagagttcattgtttagtgggcacagagtttctgtttgggttgataaaaaagttctggaaatagatagtgatgatggctcaaaacactatgaatgtacttaaagccactgaattatgtgttcaaaaatggttaagattataaggttttgatttgtttgttttgtttggtttggttggttggttgttttttttgttgttgttgttttgttttgttttgtttttgctttcagacagaaactcactctgtcacccagactggagtgcagcaacacgatcatagctcactgtaacctcaaactcctgggctcaagcaatcctcctgcctcagcctcctgagtagctgagcatgtgcgaccatgctcagctaatttttaaaaaaatttttggaaagacgaggtcttgctatgttgcctaggctggtatcaaattcctggcttcaagtgatcctcctgcctcagcctcccaaagggctgggattacaggcatgagccactgcacccagctgaatgctgttttatgttgtgtatatttgaccataataaaaaattgggggcctaagtgccgggctgtacttccaggctgagagctgtggaggtggacgggcagaggagggccatgctctctccctctctctgctccttcttctcttgtgactgagatgaagcttggggcttttctgctttgcatgttccccgcttttctgaagctggggcctccccactccctctctgggccccgctgcggaacagggaagtgatgtattctcctgttccccctggaaaacgagagttcctggaggagctgaaatccctgggagagagtgaaaaggaggggaggaccgacaagtgaggggggctagggatctggcggccactgtgggccacggggctcaccccactcggagttgctgagggaccacgtggagcatgcctggaattgtctgagacactgaaaaggggagtatttgtcccattgagggcagccgcatggggcgctagctcctcatactccgggttgcaggtgccaggggccgggggcttcctgcaggcatctcctgactgcagaggaagcctggacaggagaccccggggcagctgaggtgaggcgccgctgggctaccccatgtgaatctggctgggcagcaaacactagagtagaaggaatggccgagaggacgtgaggacacaagaggcacccgcagagcgagtcctcttccttcctcggggcaccaaaaggctgcaggtttgggatgggtctcaattctgtcccctttctcagcaactattatgggtttggggtgatgaccatgcccaggctccctcatgggaccctgacacagccctgagacactcgggcatgtttgggagagccccgcagagccggccagaggctgctgctgcaggcagagcctggcactcaatcctcctggaaacggctccgtgtagagttcctgcaaaacccggttctccgactgcacctgttaggtgtgccagggagcccttgataagatctgacgtcttccaggaataatgggcgtggccttgtgtattgacttctcctgcaggtggctccttttcagccctctctggacatcggcggttttattcccatccagcggaggccagcttcccggggccaggcacggagcctgcttggggccagctctccggaacctgtgcccagctggggaataagcacatgctcagcacttgaagaattcactgctcactggcgagtcagtatggaattggggaacttggaggtggcctgagggactgagcaggccaccaggagtggggatggagagaaggcagttggggtataggcatagtcgtgcagacctggaactctcctgtgtgaacttgggcaagttacttaatctctctgaacctccgttttctcttctaagtagcataattatgccgattccatagggttgctgcgaaggtgaagtgagtggaggcagatcaagtgctgacgtgtctgggacatgacaaaggcacagcagacactcgtcattcctactattagcagaaattgcagcattcatacccatagccaaccctgggtgaatcttttgcttagtagcctgccatgaaaccaaggcaatgctctggccttctgtgcatataaggacctctagatttggcaggtggagggaaggagaaaatgcttccaggtgacaggttcagtgtgagcaaaagcacagaggcaggaaagagcgtcctgtgttcattttctattgcttcctaaaagtttactacaaacagcagcataaaacaatagcattcattatctcacagttctgtaagtcagaagtctggcacagcgtctcatgagactgaagtcaagttgttagccaagttgaattcttggctggaggctctgggggaaaagtctgcttccaggctcattggttctcagatgaatttacttcattgcagatgtaggatgaggtgcccacttccttgccagttgttgaccagggattgctctcaactactagaggctgcccacatgccttaccatgtgtctcttttccttcaagccagcaacagtgcattgagtctttctcatgctttggatctctggcttcttctgctgtgctgagctctagtcccagatttaatgggctcaagtgcttgggtcaggccctcctgaatagtctctctatcttaaagtcgactaatttgggatttaattttgtctgcaaaatcccttcccaagggtatctagactcctggagagtaactgggagagggtgtatacccatgactgtcttagaattctgtctgccacacctagcatgtgcccaggatgaggagcagagtagccaggggctgaagcaggggatgacttaggtgtgggcagctgtggagcaggaggagtaaggtgggtgctggtggtgtggggaggtataaggtcctgtaggctttgagtggcaggtgcaggaagaggcaatggacagtacctcccatgcccctgcctgtggcccttgccaccagatgtgcatagcccaatcccagctgactccctgaggacctgctgccacccttgcctccacatctggttccctcattctgaaaagggcaccgccttggcctgaaacctccagtccgctgattcctccctctaggatgggtgaacagacccacagctccaaggttgctgagctcaggggcccagagcgaggccctgcagcacctcagagctccctgcagcaggcctggggtccgagggaggctgggccccttgcagcggccaaaagcctaaaaatgagctgggaaagcagaggaagatgtgtgcacagcagggcggttctccttcccccgggcagttcttcctctccattccctcaccctcggagaaggcagtgagggtgtgggagagtcaacattcatgctctcagcagcatttctggaacccagcacaccattccttgccctgctttggactcgctgcagtgaaaacactcaacaaaccctagattattggcaaataactgtgttccaaagaagttctcagggttaaggttctgaggttcaaagttttgaaattcaaatgctccattaaacctgctaggacctcgcctttattactggcagcagcattcacgctgctctatatggcttcagagccctgtgtgtgcaggattcatgtcttctctgtgctttcttgtggtagtggtttggtagaagtctgttctactagttgtgatactaaaagcatgtgcagactctgttttctctggcagatcaggatcttccatggaaatcacaggtctccagataataaaagaggcacaaggcaagctttaaatccccttcccatctagcctggagcccatcagaggaaggggagggtccctggcctggaggtgagaaaggttctagctttcctcactcccaggtgggtcaggtgggagcttcgggggataagcaagggagcggggagcagagagggcggtggcggtgaggtcccagcagacctgggcccctgcagggctgggttgagcacatcagctccagagattgcagttctgttggtggactttaactagtgttccagccatagctggtcatctatgccgcgctgccccagagagagggcgcgagggctaatgggttagtcatgcccctgtaaaggtgaccaggcagtgtctgtggctaggccatatcagcatagacaatgcagcaagcctttctcgttctgccagtgaaatccagtcacgttcctgcagactcaccataggtgtgttccagtagctgcaccagagcaaggctgcaaaatcctgcttataagttacggcccataggcttcaactaatttaggggacagtctggtgactgaaaagaaaaagtctcctcttaagtagtcattttcttggaggacctgagcccctcagaggtttgtgtctcgggccccattgtgcaccctcaatcttggttctgttgtttatttcatcctgctttgtggtagattctgttaaatctgagtcaggaagtgaggcttggcctgtaggctgagctcatcttctgcctttcccagcgattaaggcctaggtagacactaactctgacactgcacagtgcctgtgctggccaatcagacaagtggcctgcattccctgggcctcagtctcctgccctacacagtgggaattacagcacatagtttatgctgagggcaagccagcccctcgctgacttctcagggttgttggaagaacagaacgccatgatggataagaagatgcttccaggagcagagggtgtttctcaggtgtgggcatcgtcgtctcctccagcagcgtctcacggagttctctgtcctctttcccaccagtcccggcccaggcccctgagctggagggatggaaaactcctctgcagcatcagcctcctcggaggcagggagcagccgctcccaggagatcgaggagctggagcgcttcatcgacagctacgtgctggagtaccaggtgcaggggctgctggctgacaagacggagggtgatggcgagagcgagaggacccagtcccacatctcccaggtgagcgcgggcccggggttggggcagcttgggaaattcagagggggtgatgcaggagcccctaattctgggcagcatccagttgcctgacactagaccgccaaggcatgaatggtcccacccagcagagcacccagaatctggcaggtgggctttgggatccaggcaggaagtgccctggctgtgcaccccgtccctctaacccacctccactcctccctatccaatgaggctttgaggcccagccaggcccacatgtctttgaacatacgtctcttgagtactgactatgtgctgaacgctgttccctgtcctcaataagcttatgttctaggagagatctggaggtttcgcttctccataatgcataccatcaaagaactataacttgtgaatattttctgtgatttcaaatacaagtagttgttggtagccaaaggaatgattgttagtagccaaagtctcgtgggattctcacccagggctctgtatgtcagacatacttagacatatgaggcaatccaaccagcgtcatgtttggtcctgcaccctcctgcctcagtctgtggcatccctgaccttggaggggagatggactcatctgaaagattgtgagctgagatttgaaagtcttggcttctccctcataaagtatgaatgcattaaggatagggaccctatcaagcatatctttgcctaacaccacaaatcctcagcagatttttgttcaagagctgcttccagattggcttctagctgccagtgtgaccttgggcagaaccttcaatgtctgtggggctgtgttttcttatctggcaaatgggaattatgctgttgcctcgggaatgttggaaggtcaaagacagtaagaagtacaaaagctgcagagaatcagtgctgcctgcacaagcatgtacaggagagtcccctgtcttatctggagtcagggttctggggatccgcctctcgtgcgtgttatcccatctccaagcctgggactcctgggacaatcagaaggtgagctacctgggtgcaccctgctttgggaaaaggctgagtccaaccacctggctcactttttgggtgggacccctagctttttagaagccagaacaaacttttggctttgctggaactcagaccaggagtcactctgggaaatgctgaagccacagtaatcccatgccctgtccccactgggaagcaggggacagaaaatagtcctgagggagaaaaaaaaaaatagatgtgatgctttctttagtgtccttgaggttctaaaatcacaagtaatgcaagcttataatttgtttgttattcaatccatgagtgtttaacaagcttctattctgtgccaggcactattctaggactcgtatctaggattgagcaaaaaagccctgccctcatggactgtgtattctactcgtggatgatcattgcgatggagaaaagtaaagcggcaaatggaacggggagtgaggaggagcaggaggggcttgcagttttaagtagcgtagtcagggaagctggcatggaggggagggaggggtgggtagtggagatatccggataggaacatctgggcagaaggaccagcctgtgccagggctgggctggaagaagagtccgggcccagccaggaggccagggtgctggagcagaggatgagggagggagagctgcggagatgagtcagagggatgatgaggactgtgtcgtcaggaggtgcgagtcctgagccctggagtggccccacatgaggaagaaagaatgtgaggagaagtgagcctagagaccagtgaggcaggagggaaccaggctgctcctggagcccaggaggggagtcgagggagtgggatggggagactgccttgcgggccactgccaggccaggtaagaggggctgagaatggctgactgagcagggggccgtgacggggaagtttccactgagcggtgaaggcagaagcctgcctgtggccagctcaaggaacagaaggagatggcctggagactaggagaatagtacaactgttttgaggagtttagctgtaaaggggagagacatgtggtggtatttgggggaaataaggtcaaaataggagcattgacctgtgtgttcaatccaggggcaagtcaggggttgctggagccctggcctatccccagcccccagcggttcatccacaatgacaggagggagtggcaggtgtggggccgcgcatctaaaatggctcctgcagcacagctgtggtttctctccagctgcttgcggccacgaaggtgcagaggcagagttacaaagatgactttaaccagggtggaggtttctccagggaatacagtggaggagagaggggtgagggaggcacaggagtgatgatggtgagtcacctggatgctgagccaggccaggacgggagtgggtacctgaggtggttgtggaggctgacaggtggtagggtcagtggattggaggccacccaaagaattgtaatcctggtagcaaagagactgagctagaaagatggtgggggtgtggcgtgtgtccaggagtggggtgtttgaaatcagaggtggaggaatgcagtcatgggtcaggagagggctgggtgtgagcatgggagtgtgtgggggagagggagaggccaggaggagagcgggtcgtgaaactcagatccatcttcatggatcttgaaatcaccaagaaaggacaaaaggatgtgggaaagggtggctgtgatacaggagaaaagtccttgaggaatgtgggagcaaggtggtggctgggtggcctggcggtctacagctgaccgcatggagggtcttgtctggtggtgcattaacttatttgcataatcctttttttaatatacaaactatgcttattgcacagctaatagtaccatgatctgaagtggaaggaggaggaggattaggatagattggaaaattgtaagggaaattaacctctttagattgtctagggcaggaactaagtgaaccaacttttgcagtcccctggaagcccctagagctgacttccccaggagcagggcctgtggatgggcatatgggctggctgggtaccccctgttgtgggctgcctgccttttcagctgtgtggcatccaggcctgcagcagggcatcctccaaaggttcctccagctgaaatttgctctacctggaggagccaaggaagcctcaaagcttcaccccagaggtatgcgtggctgatggtagaatttctgtgcccagagcagccagcggggacatagttttgaaaggaggtgccctcccagcgctttcagtctgggctctgtgcttctggcaccagctccagggatcagtggggcctgactcacgcttggatgcccccatctgtgtggcgggcaaggcaaggctgtggaggggctttcagactgacgtctgctgtgaagtgtggtgtggagaacacctgtgtggtgtgacatttggatgcattctctaaactttcttcatgctctggaattccctcgaagaatgcagacacctggcaggatgctggggcctgcaggcctgcctgctgctgccggaaagggaggatgtttcaatcctgcccctaccgcgcccctgcctccctgatccccacagtcacacacacacctggggtaccgactctggaagagggacggctgtggcccactctcaggaaggccagggttagctgtgtctacataagatactttttaaaaaaattctctattaacacagctttatgggaaatatttctgctaaagcactttggcttgtttttttttttaatctgatgactagtttaaatggaagccaaaaagaaaaaaaaaaacagcaaacactcagggaatgttcctgtctgcctgtgtggtattttgatgtttctggggaggaaatttgttaagaagcttggaaaccttgagaagacctgagggagtggagaggaatgttgctcttcagctggtgaggtcattttttaggatctgagaagtgacagttgacactcagggagaaaatatctcatgatgtttgtacacttgtgttcctctcgtccttcccagtaacaactagaaagaaatgaaggatggatggatggatggatggatggatggctggctggctggatggatggatagacagacagatagataatacatagataatagatagataagatagatagatagatcagttttcctgtctcttagatgaataaccaagacaatgtgtgttttaagtttgccaacattttctggatgccatgtttaacatcatacctctccccatgcttgacaccacgcccctccccatgtttgacaccacgcccctccccatgcttgacaccacacccctccccatgcttgacaccacgcccctccccatgcttgacaccacgcccctcccccgtattttacatcgtacccctcccccatgtttcaggagcacctgctgtccaatagattggaagtccccacagtcactctatccttgggaggaggagggattttagccctattctaaaggagggaaactgaggcacagaaatggagcatggccaaaccccactgctgggtggtggctgagctgggctctggagccccatccccaccccacctacttctggtttcctgctccgtacaggccatgactgattgggtgttgggtggttaatatagatttctttcctatagaaagaaaattaggtctccaaatctcattgaccactaatcttttggggaagagattaggatgttgtaagtggggaaaattttggcacatgtgatgttcgtggatgatctagtggatcaccagaaagcttggaagcagtatgcaactctgagcgagcatgaactcacttagggagctgtgagaaatactgatgtacaggccccactgctagagatgcaggcaaaggtgaggggcctgggcctgaactattcataagcctgtgcatgactctgattgccacagtgggagcagggctgtctcctttctccccctccatggcctgctgccccgatccagtctcttggaaagataacatgtaggaaccctatgaagatacatttaatgacagcatagtttccagtaaattcttgttaaggggtcaaattaagagccagtgagagtgaagatcacttcctatagccctattttgatgctttccggcacttggaaaccctgggtttcatctaaaatgcagtgatctttacaaaggggtgcagcagtggcaatgaataggatagggtgagagtgttcagatcggctcaatggcttttcctaacaagtttctcctctttctctttacgtttctcctttcattctgccttccctgttcactgttccctcgccctttttctaaaatcccatctcttcatttccttctgcccttaaattcatttttcctgatgtctttgctcacaggaggaagtactcaatggtggaccacccatgaaaggcttaacagaagaagtgagtttataggaggactgcggggtggttcagcatgggggatttattatatattttccccttatttaaaaaatgtattctaaattatacaagtactttatgcatacattcccatagtgcacaagaattcagatattaataattaaattctcctgagctaaaattattttaaattatacaagtcctttatgcatacattatcatggtacataagaattcaaatattaacaataaaatcttctgtgctaccacctcattctgctcccttactcctacctcccatcagatgagtgagttcatttccttgccttttttaatgcctttcctgacataggtatgacttgaagaaatacaatattgtcaaatcatatatcatagccagtggatatattgttcaataacttgcatttttcacctgcccacatgccccagagattcttctgggcttgcacatctgctgtgttccgtttagtggctgcccagttgtccatagcatggatttatttaaccatttgcttaatggtaggcactcaggttacttctaaattttcccctggaaatacgtgatacttcaacacatactgttgaacatgcctccttctgcacaaataatggagtttctttagttagatgctgagaagtaaaattaattttaatagctgttgttaaagtgctctccaaagatcttccattatccatactgccaccagtgtattgggacatcttgtcattttaattcacattgtcttatttctttttctttcttttttttttttttttttttgagatggagtctcactctgtcaccaaggctgtagtgtagtggcgcgatctcagctcactgcaacctccccccaccgcaggttcaagcaactctcctgtcagcctcccgagtagctgggactacaggcacatgtcaccacacctggctaattttcgtatttttagtaaagatggggtttcaccatattgatcaggttggtcttgaactcctgacccaggtgatccacctgcctcgggctcctaaagtgctgggattacaggcgtgagccaccgcgcccggccacattgtctttatttctaatgaaattgaattaccaatctttttattttctttttttctttttttttgagatgagtcttgcactatcgcccgggctagattgccatggcatgctctcggctcactgcaacctctgcctcccaggttcaagtgattctcctgcctcagcctcccaaatagctgggattacaggcgtgtgctaccacgcctggctaattttttgtatttttagtagagacggagtttcactatgttggccaggctggtgtcgaatgcctgacttgtgatcccctcccatggcctcccaaagtgctgggattacagtcatgagccaccgcacctggccgttttttttttgtttttttttttttttttgagacaaagttttgctcttgttgccgaggctggagtgcaatggtgtgatcttgactcactgcaacctctgcctcccgggttcaagcgattctcctgcctcagcctcccgagtagctgtgattacaggtgcctgccaccatgcctggctaattttttgtatttttagtaaagacagggtttcaccattttggccagacttgtcttgaactcctgacctcaggtgatccaccctgctcggcctcccaaagtgttgggattacaggcgtgagccactgtgcctggccaccaattactttttaataggataaaattttattttctcaaagtaacaattggaaaaacagaggcaagtgaaaaatggaaaaaaatcattttatggcaactaatataatttttgtgcatcattttttaaacatcttttacaaagttgtacttctagcatacatgtaagttttatgatctgtaggttttaatgatctcctagacattgtttggtggtggtttttagcataaagtgtaactatttaaatttgctctttttctgctaggtggtaaaatataatagaatgaaagctaacatttattcattcaggctcttttgtaggctcagggggcaaagtcaagaacaaaacaaccatgatctctgtctcagtttctcacagggaaagacagacaatagagggagaaggaaatgggatgttagaaggtgatgaatgcatgagggaggcaggaagtgagtggggaaggctcgcttaggagtgaggatttgggcaaggtgactcacgcctgtaatcccagcactttagaaatctgagacaggtggatcacttgagcccaggagttcgaggccagcctgggcaacatggtgaaactcagtctctactataaatacaaaaattagctgggcatgatggtgcatgcctgtgatcccagctactggggaggctgaggtgggaggatcacctgagcccaggacccagaggttgcagtgagctgagatcacaccccttcactccagcctgggcaagagagtgagaccctgtctcaaaacaaacaaacaaaaaacagaaagaaagaaaaagaaagaagacagggttgggggggagggtggggaggaaggaagggagggagggagggagtgaggatttgaaggaggtgagagtgaggccacctgggaaagggtatccaggcagagggagtggccagggcaaaactctggtgtggggcataccacacagtcaaacgggatccctctgaatgctatgtagagaataggctatggtagggggtcagcaagagaggaagcagagaccaggaagccgtctccttgctgcaggggagaggcaatggagactggggccgtgtggtcactggaggtgatgagatgccttcagagtctaggtatgcttggaaagtgctgacactgtgattgaccctgaagattttagcctgagcaaataggatagactttgcagaaatgagctatgcaagaccctggaagagcagctctggggggcaaaggtcaagagtcccgtttgggcatgaaaggtttaagatagtattagtcaccttagaggagatgttggtccaccagttcgatgcacattggtggtgttcagaggaggataatgagctgggtgctgctttaagcccagggggtgaggaagtttacaggagaggatcaaagattgagccttgacttaagaagttggggagatgaggaggaagtaacaaaggagactgtttgcattgtttctcacatgttaactcatttagtcttgaagatgttgttattattaccatcttacaagggaggaaactgaagcacagagaggttgacttaagcttcctgaggccacacagcaagtacatggcaagactggggtttgaaacaggcagcctgtctccacgtaccatccacttatcctctctgctattggtagacctattattattacagatgggggaaacttcgtcctggggatgaagcgatttgcccaaggtcatagagtaagtggcggagctgagatctgaattcaggactctctgcttcaagaactcaagctcctaatcacgcaagcattctctacaacaggaaagttgtttgttccttaaaagatgggagcaaaagcctccctctctctctctcaaatctcagccatcagcagcatcctgtccctcttagcacaggtcttttctaaaatatcactggatagagaatgagctgccagccagccttgggtcccacatcagggtcttggttctcctccccatgtcagtaagcccatgtgcccaggagaaaggaagatgtcatgcacactcctgtctttgagaagttgggtcttcaggctggcaggattctgactggggtctgtgagactgggaggaagccatttcccttcagcctcaagtctcccttcagggaaatgaaggcattggtgagagccctggttgcattgtgcagcccccacctggcacaggttttacacacagaggtcacattccaccaccacctatgcattcagacactggggaagacctggcctgtggacccccaaaatcccccctgggtgtctgacgccaccctcggttaagaagccctgggtaagatgacctttaaaataactatgcattttgaaataatttcaaatatacatagaaattacaataatagtgcaaacaattcttgcatatccgattaacatcttactacatttgtacccacactctctctctaaatatatcttatgatatatataatttatacatataattgtatgtaaaacttctttctaaatcatttgagagttagttccagacatgatgcccctgtatcccttgacactccagtgtgtatttcctcagaacaaggacatgatacagtataggaaatgaacattgatagaatgctgtgattaaacctacagctctttcagcaattttcccagtaatattgtttagagcaaaaaaaaaaaaaaattggctgtgatctttgtctaatccaagatgacatattgtgtttaatatcagtcatttttcctgggtctttgaatgatccctatttctgtcctttgctcatgctgccactttttggctgtgtattcctgggtgagttacttaaccacactgtgcttcagtctccatgtttgctaattagagaaggtaagagtgcctcagcagccatgaagagtaaatgttagtaagtgcaatggacttagaacagtgcctagatttaagagaagtctttatatagtctggtgattaattctttgctacacagcaggctccccttatccactgttttgctttccatggttttagttacccacggtcaactacagtccaaaaatgtcaaatgaaaaattccagaaataaacaatttatacattttaaattgtatggcattccaagcagtatgatgaaatctcatgctgtctctcccgggacatgaatcatccctttgtccagcgtttctaggctgtatcctctacctgcgcgtcactgcccagcccagagtcactgagcagacatctctgttacaggatcacaaacagatgtagggctttttaccacccacggtttcaggcatccactagggaatcttggaatggatccctcagggttgggggggtgggcgactgtgcatgttgcaagtagcttctcacttgtctttatttgttcatgatttcttttgtcgcttagaagtttgaaattttgatgtagtttaaaatttgcatctcagatttcaatcaccttggaatgtgttttccaagaatagtgcaaggcagatatctaaggtcaatttttcaatggctgggtggttgtctcaataccatgtatttattgatgagtctctccctcaattcaaaacacaatccttacctatatgaggttcccatttgtacattaatttgcttgtgggtgcagttttatcagttgatctgctcttttattcctgtactggttcaacagcttttttgtctctagctttttttttttttttaattaatttatttattttgagttggagtctcgctctgttgcccaggctggagtgcggtggcgcgatctctgcttactgcaagctctgcctcccgagttcatgccattctcctgcctcagcctcccaagtagctgggactacaggtgcctgcaaccacgcctggctaatttttttgtattttttagtagagacggggtttcaccgtgttagccaggatggtcttgatctcctgaactcgtgatccaccctcctcagcctcccaaagtgctgggattacaggcatgagccaccgcacccagcccgggctctagctttatgagatactttgatatctggtagggctggtctcttggaggagttttaggcaccactgaaatgggggcctggtctagctttagcacctccagcctcccacactctgagcttcttgcttctctctcctcctcctccaatgctcagtaccctggggtctccccaatctttcccaatctctgctcataaaacactggccgggtgtggtggctcccacctgtaatcctagcacttgggaggccaaggcaggtggatcacctgagctcaggagtttgagaccatccagggcaacatggtgaaaccctgtctctactaaaaatacaaaaaaattaaccgggtgtggtggagaacgcctgtagtcccagctacttgggaggctgaggcaggagaattgcttgagccccagaggggaaggttgcagtgagccaagattgtgccactgcactccagcttgggccagagtgagactccgtctcaaaaacaagacaaacaaacaataaaacactcttcatcctgggatgtaaagacaaatagcttattttcattgttttttattgtgaaatacttaagatggactgataacagagaataataaaatgcacatctattttgagtggagaacaaacacctgtactctcatgtttattaagtcttaaccctgtgtcatgtttgttccaggtttttaaattaagacacgaattttaatagctgtggttgaggcctttaaaccactcttgtgaatttgatgctcatcgttcccatatctaacaaacttcccacgtttcccgcctttctgtttgatgaccttttcaagtaagacaccacctttacccccaagagaacttaaaggttcaggaggctcaaagctgtaagcctgtttgccttgaaagggaaatgtgtgggatttcaagccctggcccggactgaggagcgggtctggagaggtggacccttcttcattcttgactcatctcctatatatcaggacaggttctggggaggtccatttctggagattttctaggcggtgtctcagagaaggcaaacgggaggcaggaggtggtggtgcctgtgccacaagaagctggtgttgagagcagaatcccagcagggatggggaggaacttcggaatagggaagggagggctaccagagggcctttagggccagggaagaagcgtgtctctgatggaggggattcaggcagtagccctggacaggttgcctctggggctactgctgggctggggtttgagatggagccccacaagcccagtgggtagagcttgctgtgctaagtgtgatcattcacacttcactcctccccatttacacagtcacacgcagggccacagtccctcctcctgctgggggttgtgcccgcctccggctttgttgggtctctggaatgaggctctgtggactccaccatcttgctggctttcttgtgcacagatcacccgctttgcctgctgctcatctgttccacactctgagatccactgcttcatttccatctctaccaccactgctaatgaaccccaatgtgggaccctccttccccacttcccccctgggccagttcagcctcccctaacagaagccttcaacccctgcatatggaggaagtgtctctgagttctttagcctgacagccgccatctgccctaagctggccacgttctactgagcctgttgcccctcttgggcacctcactcttctctgggaaccctgggttgcctgcttttcctcccttacagcccctgccgagagcacactcttcttcatctcagccgtgccgtccccacccccctctcattgctgttatttgacatgtcatctgacctctcctgtgtggggacactctttgttgagggccccacacagaaggcactcaggaagtgacttttggttggcaaatgtacagttatggatggccttggacaaggcagagcagtctcgttggagcttggaaagctcaccaaggagggtagggttgcatacggatgtgcacgaagcctcagggtctgatttgtgcgtgcccatcaggaggccccatcctgccaaggcccgtgctgaccctggagaaggtgtgtcccccgtgagtcaccgtgccgtggaatatcacaccagcactacgcagctggggttaaaatgttcaggatgcctggaaggggagaagcctttttctgagaggtcacctaggatgggatgaggagtgcaagcatggcctcatgttccctccagccagtgggcactgtgtgccttggatgtctcccacctgtcagccaggctccaaccagggaagcagaaactactccaatatataaagcagagggattatagttacagtactttaaacattatacatacgtatgtatatacatatacatatgtttatgtgtatctgtatacattattctaaaaatgtggactggacatggtggcttatgcctgtatcccagcactgtgggaagccaaggtgggtggatcacctgaggtcaggagtttgaaaccaggctggccaacatggtgaaaccccatctctactaaaaatacaacaattagttgggcgtggtggcgggcacctgtaatcccagctactcaggaggctgaggcaagagaatcgcttgaacctgggaggtggaggttgcagggaaccaagattgcgccactgcactccagcctgggcgacagaatgagcctccatctcaataaataaataaataaataaataaataaataaataaatgtacatatatacttatagttatgtatgcatgtattttacgtatgtatgaatacatacatattagtttttgttttggaattattttagacttatagccaaggtgcagaatggaacagggtgttcccaaacacttgtcactcaccttgccgtaatatgaacaccttacataactatagaaccattatcagaagcaggaaattaacattggtacaatgctcttaactagaggctttattcagatttcaccagttgttccacgaacgtccttttcctgttccaggatccaaatttgcatgtaattgccacatctcctctttcccttccaatctgatattttgtcttctcttttcttttacaaccttgacacttttgaagagttctggtcaatgcttctgtagaaagctcattaatttgggtggcgtgatgttttctcatgattatgtcgagagggtgcattttgtcaagaataccccagaagtgatgtgcccgtctcgatgcaccacactggggagtccatgatgcagatatgttttgttactggtgatattaaccttgatcacttggctaaagtggcatctgatggtttctcatttttctctccccactgacagccacaattaataaatatcttgggggaaatactttgagactgcaatgatccaagcagagggaatttaatacaaagaattgattactcctacctgagaagctccacagcccagaaaatggcaacctcaggtagctagtaccaactcttgacctgaggctcaaagaaagaaggtgttgccagagtccagggttcccggtcatgcatagaagcctgtctggtgaggctggagccaggaaggagacccaggcactgctggtaatgctgcctgaggcatagagagatgggagaaatgccctcttcctgtctcccattggccaagcccagccagaagccagctgacgtgggagcctgggaattgtggtccgcaggggtcagcccctctgcagtatagtggggatgggcaaggagtgcctctgacaccgttgccacttctctagggctccactgacccttatggtagccacaggccacgcatggctcttgaaatgtggctcatccaaactgaggtgtgctctaagtggatttctaacacggaatggaaagaagaatgtaaaatatctcattaacaacttttcatattgattacctgttgaagtgataatattttgatgtattagattaaatataatatattatttcatttaattttacctgtttcttttaaaaatttggctactagaaaatttaaaattccgcctgtggtttctatgtgtggctctcattttgtttcagttggatagtgctgctctagggtacacttctacccagcctatgtcaacaacattgtaagaataacatccatcctggacaaaggtcatacccttgagccatgctcaggagggcatgtccagccaaggttttagaaagccaggactgcactggcacacactcacagctctgaccatgtcatcaaacatacagagactgggcttccctctgctttttcttttttttctttttctttttctttttctttctttttttttttttttttttgaggctcactctgtcacccaagagcattgtgcattggcacgaccacagctcactgcaaccttaaattcctgggcttaagcaatcctccagcctcagcctcccaagtagctaggacagcaggtgcatgccaccatagctggctagtttttgcttttgttttagtagggacaaggtgtctctatgttgcccaggctggtctcagactcctgggttcaagtgatctcctgtcttggcctcccaaagtgctggattataggtgtgagctgcctggccctcctctgctctttatgtatcatgcagggtgtaggttaaggtcaatattcaacaacttcagctccggaggctacctaatgtttaatacaatagtaaaaacactatcatatacctggatagcatttgacaggaagggctatatgactgctactgcattgtatctatacagtgtttttatagctcacaaaggtctttcatcccagcctcccagccagtcacccagcatggctctcctcattttatagatgacagaatgaagcctgagagatcacatggatttctgtggctcccagactcccaatgcatcccttggggagctcgtcaaaatgctgatcctctggccctggcctcacagagtctaattcagtgggtaaagcctggggcccagggacctccatgttgcagactctggggactctcgtgcagatggttgtcagaccacactttgggacacagcagccctctgagttctcaggggatgtgagtggcagggcttgtctgagccatgcttctaatagccaggttgggctctttcctggtgccaaacccatcatcttttggagctaggcttctaggaagaccaatacatacctgcctcactgccatctctggccacacccgtgatgtaatagagggttagtgtggctgaagccaggtcaggcggtcaaacatggtgctggttgtaccaaactcagaataagttttgtcatatctggctgactttgggatatagccagtctttgtcactgtgctgggctcaggtgaagggaagtgagtttgcctcccccaagcggacaccaaagcttcatcttgatgtggagcttgatgatgccaaattgggtctgatggttgagaaagatttgcattgaaatggccaaataggattccacagtcatgctaatggggaaggccagggcacaactcctgcagcctggcagagtgagcatgggcctggctgtcctgccgtcactgatcgctcctttctgttctgcagtggacagcggactgcagcgaaccgctggacagcagctgttccttctcccgagggcgagcccccccacagcaggtagggaaccagctctgcgctctgtctgggggtgtcctatgtcttgtctgcctgggttcctgggccggcccacagtggctcctgaggagtggtgacatggagagtgcagagaggtgggagaggggagggggcatctgttccctggaaagccctccctaactccctgcccacagggaagctcccactcccccaaactcatcgattgatgagatttctttttagtagctgcgttctatatattaacacatatctggaagcagcccagatgttcactgaggggaatggagaggtgccttgggatccatccttacagtggaatattacacggctctcaaatgactgcactgagggttcaggtaccgacattgcagccccacaaacaatgggactcggcattttgatgctggtgggtgctttggatatcacttctgctccagatctgcagaaggcctgggaggggcagcctgtgggggagctgtcagagacctgtccatccccccagccaaccaacagtcctgggaccccgccagagcctgccacctttctccctgctgcttgcggtgaggtcctgagaggcttgtgggtgggttgcatggctgggagggaagggaggcagctgctgctctttgagagctgccctggtgaccccctggccctccaccaaaccctatggtggtccagctgttctcactgatacctcatccctgcctgcaggagcctgtgggattagaggctgaaaaaaacatgtgtccccatctcgagtccagcctccgactatgcctgtctggaaagcggagggagcccctgcaggctcctgcgaggggccatgcctggtttcagagccgctgcagtcatgggttgccctgggcctgcttgctcatgttcagcttcagtccacttaatcatgttcagcttcggtctcctggcagattcacccaactcctctattctgtcccgagagaagctggtcagtggccttggttctagatctttcttaggctgtagggcgtggctgccccatggtgtggagggacggctgcccaggatggttctttcacgtgacaaaatgtgcttgtacgtcttgtttcttaagaaggaggccataataagagccccgggggtggggggtgatgggagacctggagtctcgtttttgttctgccgcaaacttggtggcaaactcttccttcttgggtctcagcttcctcacataaaacccagaaggagcctcgacggcctctgagggtccttctaacatctccgtgccatttgcagatgaggaaactgagtcccacggaggtgccacttgtctgccctcctccccatacggcactgctaccttgcccaactgcaggaggtggccttctagggggtgcctctgtctctgctgcctccctgcctgggaccccatgttatgctccctgaccccctagcttttggtctaggccctgctcctcaggggcactgtctctagctcctgccagttattctggggtctcctaaaaggagattcccctcactcttcagcagcaatggtgaacttggatttggggactcaagcaccagagagaggctttcaggaagtgcttgaagctcttggatgggaaataagaggtttgtcactgagagctctctgctgtttggtcagcaggtgtctggttctggaatgttccaatgaagagtcctttttcctctcctctttaccatctttctgggggcttgtctgctgtctttcccctctggtccccttctccacatcactcctgatagggtctccaggggttcaggaagtgttctaccccctttctcccctcatctgcctcacctcccgcacccagctgtcctctcgggtctgccttccccacctgcaggaggtcatgtaggggttcgccagataatatgggcccatggagcagggctgggggcttgtggagtggggttaggtatgggcttgtccctgctccaggcaccctaacaccgcaaggagcagctcaccccaatctcaccttcaagaagcagctgagcagttgactcggggtacgcagtgtttgacaaaacgaaatataactcaacttaaaagtgaagttgtgaaaagctcatattaaatcctttcttgacaggtggaactgagacgtagcttcattacaggggaggagcccaaggagggtggaggacagggtctctgcatagaaccccacctaatcacctgacatgcccagaggcaaggttttgtgggagggacctcctacaggccttaggggcactggcattcccatcacccctgacctgcggtggccgactgatcatctcagagggaagagggagagatgtctacttccgagaagtggaagaggggctgggccactgagggacaccccctgccacagacatgtgtgcctggtgccgtgttggtcttgggtgcagagtctgcgacgcccatgcctggagagccggctgggacggaagggaaggctcagtcagaatgctgggtttgcctgagtctggcgtgggatgcaccacctgtgctgtatgaaattgcttacagccacggaaacctctgaaggttggagagggtctttcaggagcgatttcttagaggtttgtcaaccaggagtgtttgcagggacctggtgctgagctcccggtgggcttgaagccagggacctgccttcaagggcgtcactgctaagtgggaaggacaagacacaggtgtaaaaaaatgcaccctgcacggcatgagatggggcccagggggcagcctggagttcagaaacctgggcaggtgcacagaggaggtgagggggagttgcacctcctggatggatggccaaggttcagacctgggtgctgcagggggaggcaggagcatctgtgggcctgaatttacacgaggtctcctgtggttggcagcaccttggttcagtgatgacaggctttatttttagacatcagagactgaatttattaggtacaaacaacagggtggcataaacaagaggaatctttatttttctcttgccaccagcctggatgggcgtttggggctggtgtggtagcccaacagtgtgggggccggctccttgcttctcactgctctaccctctctagagtgttgcccttggccacgtggcccatggtggctcatacccacgtccatgcatctgcccgtggggacacccacctgggtttccttcccaggaaactctgatttctgcccacgaagcagccatctcctgttgccccctactggagggatcaaagctgggcggcttcctttgagtgacggcaccccaaggaaagccccatgtagctggcctgtggcagtgtccttgtcacccctgtcatgcaggggctctctgatggaggaggacccaggcagctgcccactgaagggtgcctttgctgagtgccactctgatgggatgctgctgttcccttcatccttcaaggctcccttcagcctggcccaccagaggcaagagcacaggaccagctctcggggacaccacccatgagcaccccggctggctccttgctgcactcacgcgcccaggcagacaccctcacactgactcatgctgttgccaagctgttccgcgcacacctgcctgtgcctcagccagctggtcaaccctaagacgggagtcagggcgggctctacttcctcaaccacttctggcctagggccttgtactcagtaggcactcaatagtgatgcctgagactgcactgagttggcccaggctcagtctgtgcagtcattccctagtgggcccttttcctcctgccacaccaactttgatgagctttctggggccatcaggatgatgggagaacactgctaacccattttcacccgtggggacaattagtttcagggagaaactgaggctacatggagatgcggtggctggctgctctggtgctcctcttgactgcccacgttggctgcacatgtccaggaaagtagagttggcaggaagatgcagaggtcctgcattctgccaagcaacctctgggtggtgggtcacagaccatgccctgcaccagggcccagggcccagatgtggccccatttgcagattagtcatacactgggatgattgattcatccccagcaggcttccagcctcatcctgtttgttattttagctaatgtcaaaaagaaaaccttgctttttctgaaccctttcagaggcagaaagtgggggcaacctagaagagattgggtcccacgagagaggaggaagagagcccagagagtgtagagcataaaaagggctacagatagttcagaagaggctgaccagctgccggcaactgggattcagctgtatttgggattgcctgacatcctggcatcctcttcccaaaagactcacccatcacctagtcatttagttaggacgtcagacgtttccagctttttattgtaatgggggaaatgtatagggattgttgaaatgagagactgcagcagcagtacattcagaaagcttttcaaggtgttggcatgggatttagaattcaggaaagaaaccaaatgcatgggaaaggttgtatggggtcaggagtgagcagctgttttccatctgcacaggtgtgccaagaacaggaaattaatatgcaccacaacagcacagcctctgattagacttgggaaggacttcccttgacggaaggacttgttggcccaccgtgttggctgttaagcaaggtgatgaaatctttgctaggaacctgatgagcacgactgcctatcaggcaggttcacctgaagccctgggaaagatgggggtgtgtcacaaatgatgactttgagttttgactgagggcctatgatcccaacattccctggaataagtgaagggcactctcttgtttcatcctgacgccctgtagcaaacagaagcataaagagagtcaaagagccttgtcccaagctccaggagaaccagatgttgacccaggagtgacactggctccaagcacctattcagaaaaacaactacacagactccttagagtctctccagaaatctctgtttgcattctgtaactccgtgaaacacccaactggatccaaatcactgccacagcaggtctgggtcttcctaatttctctactgttccccatcccctgatacctttgccaaccttcaggccagctatatgggcaccaacattgactccgacccaggggataacagatggtaggtggaggagaccctcaaatacactaattacctctggccccagaaaaagatggaaggagttttctgcaagtcaacttgctacccttcagtaattataggatttggttctgtgctaatttaaaaaataattagtgcaaatgatatcttagtaaaagtgcctacattttttagcacttccttggatacgtaagaaataccaggtatatgttcatagtgctgctctctgtttagttcgtatttattgagtccctgctgtgagcccagcagatgcgtctgagtgggagcttctggatcactgccagtttgtagggtaaaaactagtttacacagaacaagatgacaacatacacgtaagatccccaaagagatgtcatcctggccacaagaactgtggtgattccaaagagtggttcagttggtctctgtgggtagggaggtgtcttgcaggacatgaggcctgacctatgcctttgggaatgggtaggatgtttgactagatggaagggaagagagaagaagatgaagagagaagacatgatgttagcaaaggttgagtagggcacagtgttgggatgttagagtaatagttaggaggcagcacagctagaggaggatcatattgggtgttactcaagtggggggctgagaatggtgaatgcagaggggtctgtgtgtgggctcagatgttggaacctctgtccaacccagcccctgttgtgtgccttgaacttttttcttgtatctttctctggtgttccatacaggcaaagtctgttcccctgtatcagtcaggatagcctagataatgctgcagtaacaaacaagcccaaatctcagtaacattaacattaaacaaccaacaaccaaacaatccaaatcttagtaacattaaacaaccagggcacagcttggtggggcagttccgttttaaccagttgccatgacagagaaaaaggagctctggaggatcatgcattggcagttcagtgctccagcctagatacaacacttgtcacttccactctgagcttgttacccagaacgggtcatgtggcctcatccaaccataagcacattaagaagtacaacgctactctgtgcctggaatgaggggaaccagaattatttggtgactggctggaatgactgtcacatgccctatctctagtagcagcttcccggaggctggggctgaacttttctttccctcttcttcttcaccacctcaaatccttgatggaactcaaggattaaacttgtgggggcctagggtagcgcttagctctctgaagatttgctgaaaaatcaacttgtaaaaggcagattaataagagaaaaggcatacacatttatttaacatgtatacatgggaggctgcagaatgaagacccaaagatacagggaaaattatctatttttatggttaagttcaacaaagtatggacagttgtagaaatgggattggaccaaaagggcatgatctaatgctaatagacaaaatggggaaacacagcaaggcctgtctgtctagactctccctggcctgtctgtgcagcattccttccttctgagttggggcaggaccctctctggaatgggggtgtcatgacctataatcaaacaaagcagatcagataatttatttatggccagtttttaaaaagaaaggcagagggagaattagagctctatctttaggtttcatggctggctttgggagaaagaggctgtggtttctcgtggtggggaagagggagtctaacttctatggctagcttcaggggagagtgagactgacaggcaggagggcagaaagtcagagaaagacttttgcttctgaggctgctgctgaggccttcattttgggatattgttttctgagccccaacaaactcccatgcactggagtttaaggcctccagtgaattctgaaacatcatgggctctcagatggcaggaagctcagaggtcacctgatccaagtccccaccatgttagcaaaggttgatttccagtagcagggagcatttccagcagcagggagctcactgcttcagaaggcatctcagcatattgttaggcagctccattaataaaaaagttctttctttgattcagccgcaagcccccttctcattgctccagctgacggtttttatttaactcttttgcttgtgtcttttgcctacttactttcctcagcagccgagcacggcaagtctttttaagctaaatatcccctttcctgcatgaggaattgcctttgctgtggttgggtcattcctttgtttatttatttgttctttcacctattgatcggctccaatcagccagtcatcactgagggctgctgtactccaggttgggcactgggcactgggatggtgaggaacatagccatggtggctgtttgcatggagggtagagtggagagaacagatgctgaagctgcagtgagaagatgtctgggacatgacacagtggtccttcgggcctgggtcacatgcccaggagcactagaagtgtgcgctgtgattccccttaacattcctcccagaaacaaacatggcacaacctctgtgctcaccagcgtgtatgtctgtcttccagaaaatgccatctgtccttatcctcaaagtgccttctggctccagctcacttggaggaacaggatgccacacttactaaacaatgctgacaactagctcctatagggagaaccatcagcagccatgcattgggtgcttgctgtatacattctgagccacatggcctggtctctgcactcagggaagctggaatctgcttagggaaataagctattctggaggagatggcagcatgtgagtatggggaggagtaggctggtgtccgcacagggccttgcattgtagcaggagaggtgagacatacaggcaaagtgggagccgccatgatgtcgcggaagcagcattgcacctgggtttaggagatgtgctttcagcctgggctgtgcttccaacttactattggatccaaacttactattggatcgtggataagatacattatctcactgcagcctcagtttctgctctataaaatgaggaggtgaactagatgtaaggccatcaaaatgtcttgttgaaaatatagacctaaacttctgcttctggaaaatgcaatagatgttcttatctatatttctcctgctaaatacaactaaaaacccaagacattctgtataaaatgaacgtaagaagactcggagaggtggagggaagaaggcagacctgctagggtgcccagaacctgaggaacgacacagcgaggagcttgttttctttttgcctcatgtgtcccatacttggcactaggaaatgctaatggacacaggcaaaaaaaaaaaaaaaaaaatcccaataaaaagctgctctctacaggaaacggactaagaaaagagaaaaagataggatagagaagaaggaaaatgataggaaaagatctagcaaaacaaaaaacttttcgacagtcactgctgtaccccagccaaacaccacagaacacatccccacccccatccatcccagccaagaccaagtgggagctcagatcccacccctgctgggctatcagaggggctccaaccccctaccagagtagtgtcagagaaggccagtggggagctgtgactttcgtccccgccaactggtgagaaggctcctacccacgccccatggtgtcactggagacagcaggaacctgacttgcacccccactgggcagtatcgaggtgtccctctccttcctgctggggtggtgtcagaaatagtgagtcagacttcatagactcccagggatgatgaggccagccccactgcatgtcagaggggaccacatggggatccggaactcccacctccacccagcggtgacagcaagcacccctgcggcgtcggaggaggttgagtgggcaacctggacttccacttccacctggcaataatgaggctgtcccctgcccttttcccctgccagagtggtaccatgaaacacgagttaaagcaggaggtttaaatatgactctctcatgagctaacatgaaaatgtcctggtttcaattaaaaattgtttgtcatatcacaaacaaactgaaataatcaatggatgttaacactgagatgctaaattggactttatcatcattaaatttttgctctgggaaggaccctattaagaggatgaagagacaagttacagagagggagaaaatatttgcaaaacatatctgacaaagggctcgtatttagaatatataaagaactctcaaaactcatcattaaaaaacaatccaattagaaaatggacaaaataaagtgacatttttcactgaagacgtttttccctgaaggtgatgtacagatggcagataagcacacaaaaaatatgcaacatcattagccatgacggagacgcaaataaaaccccaacaagacatcactatactccaatcagaatggttaaaataattttttttaaagtgacaatgtccacttcaacttggcagcattaaaaaaaaaaagtgacggccaagagcggtggctcatgcctgtaatcttaacactctgggaggccgaggcgggtggattgcctaaggccaggagttcgagaccagcctgggcaacatggtgaaacaccgtctcaacaaaaaatacaagcattagctgggcatagtggcacatacctgtggttccagctgctcggaaggctgaggtaggaggatcacttgagcctgggaggtggaggttgcggtgagctgtgatcaaaccactgtacttcagcctgggtaacagcgagaccctgtctcaaaaaaaaaaaagaaaataaaataaaaacaaaaaggaaagaaaaactaaatgacagcgtccaatgctggtgagaatgcagagaaactggatcactcctgcagtaggagtagggatgtagaatggtatagccattctggaaaacagtttggcagtttcaaaaaaaaaaaaaaaaaaaaaaaacgaaacctgcaagtaccatatgatttgattgagcaattgcactcctgggtgtttatcccagagcaatgaaaacttatgttcacacaaaaacttgtactcaactgtttgtagcagctttgttcacaatacacagaaacctggaagcagctcaggtgatcttcagcagatgaatggttaaacactcagcaatgagaaggaatgaatgcctgatgatgcagcagcctggaggagtctctggaaatcatgctgagtgattttcaaaaagccagtcctccaaagtcgcatactctgcaattccatttatataacattcttgagagggcaaagtaatagaaacggggaagaggtttgtggttgccaggatgagggaaggggtaggggcaggaggaaagtggatgtggctataaggggcagccttgtgatggtgggagtgttctgtgtctccactgtatcaatgttgatacccggagatgctgagttggacttcatcataattaaacttttgctctgggaaggatcgtattaagaggatgaagagacaagttacattgtggcattgaactatactttccccatggagggaaactgcgtatagggcacaagaggtctctttgtattattttttacaagtatgtatgaatctacaaccacctaaaaataaaaagtgtaatttgtaaaaagtataaaaagtgtaatttacaaaatacaaaaagtaatttgtaaaaagtatttctatttcctcagaaccttacatggagattccacatagaaacaggaaagggatagaactgtttttagggggcaaggggaggagccctgcctgctttctcccccacccgcccacctcatggctcttagaacatctctgcaggactcctaggtcaccccccagaccagatgagctctcagcctctcctgtcatgaccttctgtagttctgagtctggtactggcagaaaaggacagaactttggggcctggggagttcaaagaaggcctccctgtgaggcaaccttggaggatgggatggtgttggaatggggggtgttgattttccccatctcctggaagcctttccctggcaggagctggggacagttgaggaggatcccattatttcagcaggttttggacaggcagccagacagaaatggcctctggtgtggccctgtccaggacaggtccatttaaaacctaaatcacaaccttaattagctgagagtgggcagagggttggcctaggagaaatatacttggccacaggcattatcattgtctcctatctctctctggcctttgggtcttaattcaaagaaaaagggagcatgggggaaaagacaggatggacagacagacacagatgtcccagcatgaaaggaatggcctttccctctcccagactcagctttagtgccacccagaaagctgtctctgctgggctctgccctgctgttctcctgcttcaaaggccccttgggggtctatttccccctttcccagctgtgtctggggtgccgtccttcgttctgaacacacacacacacacacacgcacacacacacacaaacacacacatggtgttgccatgataggcctgtttctctttgggttctgccccctgccacctccccctgtgctttccccctcagttgctctctgagaagattcaaccattctcaaagtctgctttagtttgggcctgagaggagtttcagatctggcccataggaagcctctgttttggcccaggagatgagtctggggtcctctggtccagaacatttcatgtaatgtaaaagccctcatagtgtctctcatatattccaatatagagtcaccaatgtagtccatgtagtcgtgggaccagtgaggaaacacaggtccaaaaagccagagtgaggctgggcgtggtggctcacgcctgtgatcccagcactttgggaggctgaggcgggtggatcacctgaggtcaggagttcaagaccagcctggccaacatggtgaaaccctgtctctactaaaaatacaaaaattgctcgtggacccattccaagatggccaaataggaacagctctggtctgcagctcccagcatgattgatgcagaagacaggtgacttctgcatttccaactgaggcacctggttcatctcactgggactggttggacagtggacgcagcccacagaaggcaagctgaagctgggtggggcattgcgtcacccgagaagcacaaggggtcaggggatttccctttcctagctaagggaagccatgacagatggtacctggaaaaatgggacactcccacccaaatactgcacttttccaatagtcttagcaaatggcacaccagattatatcctgcagctggctcagcgggtcccatgcccatagagccttactcactgctagcgcagcagtctaacattgacctgtgaggcagcagcctggagggggaggggcgtctgccattgctgacgcttgagtaggtaaacagagcagctggggaagctcgaactgggcagagccaaccatagctcagcaaggcctgttgcctctgtagactccacctctgggggcagcgcatagctgaacaaaaggcagcagaaacttctgcagacttaaacatccctgtctgacagctctgaagagagcagtggttctcccagcatggtgtttgagctcggagaatggacagactgcctcctcaagtgggtccctgacccttgtatagcctaactgggaaacacctcccagtaggggccgactgacacctcatacaggcaggtgcacctctgggacaaagcttccagaggaatgatcaggcagcagtatttgctgttctgcaatatttgctgttctgcagtgtccactagtgatacccaggcaaacagggtctggagtggacgtccagcaaactccaacagacctgcacctgagggacctgactgttagaaggaaaactaacacacagaaaggaatagcatcaacatcaacaaaaaggacatccacaccaaagccccatctgtaggtcaccaacgtcaaagaccaaagttagataaaaccacaaagatagggagaaaccagagcagaaaagctgaaaattctaaaaacaagagcgcctcttctcctccaaaggattgcagctcctcgccagcaatggaacaaagctggatggagaatgactttgatgagctgacagaagtaggcttcagaaggtcggtaataacaaacttctcctagctaaaggaggatgtttgaacccatcataaggaagctaaaacccttgaaaaaagattagacaaatggctaactagaataaagagtgtggagaagaccttaaatgacctgatggagctgaaaaccatggcatgagaactcgtgacgcatgcacaagctttaatagtcaatttgatcaagtgtaacaaaggatatcagtgattgaagatcaaatcaatgaaataaagtgagaagagaagtttagagaaaaaagaataaaaagaaacaaacaaagcctccaagaaatataggactatgtgaaaagaccaaatctatgtttgattggtgtacctgaaagcaaaagggagaaccaagttggaaaacactcttcaggatattatccaggagaacttccccaacctagcaaggcaggccaacattcaaattcaggaaatacagagaacaccataaagatactccttgagaagagcaaccctaagacacaaaattgtcagattcaccaaggttgaaacgaaggaaaaaatgttaagggcagccatagagaaaggtcgggttacccacgaaagaaagcccatcagactaacagcagatctcttggcagaaactctacaagccagaagagagtggaggccaatattcaacattcttaaagaaaagaattttcaaaaaaaaagagaattttcaaccgagaatttcacatccagccaaactaagcttcacaagagaaggagaaataaaacccttcacagacaagcaaatgctgagagattttgtcaccaccaggcctgccttacaggagctcctgaaggaagcactaaacgtggaaaggaacacccagtaccagccactgcaaaaacatgccaaattctaaagaccatcgaggctaggaagaaactgcatcaattaacgggcaaaataaccagctaacatcataatgacaggatcaaattcacacataacaatattaaccttgaatgtaaatgagctaaatgcccaattaaaagacacagactggcaaactggataaagagtgaagacccatcagtgtgctgtattcaggagacccatctcatttgcagagacacacataggctcaaaataaagggatggaggaagatctaccaaacaaatggaaagcataaaaaagcaggggttgaaatcctagtctctgataaaacagactttaagccaacaaaaatcaaaagagacaaagaaagccattacataatggtaaaaggatcaattcagcaagaagagctaactatcctgaatatatttgcacccaatacaggaccacccagattcataaagcaagttcttagacacctacgaagacatttagactcccatccaataataatgggagactttaacacccaactgtcaatgttagacagatcaacgagacagaaggnnnnnnnnnnnnnnnnnnnnnnnnnnnnnnnnnnnnnnnnnnnnnnnnnnnnnnnnnnnnnnnnnnnnnnnnnnnnnnnnnnnnnnnnnnnnnnnnnnnnnnnnnnnnnnnnnnnnnnnnnnnnnnnnnnnnnnnnnnnnnnnnnnnnnnnnnnnnnnnnnnnnnnnnnnnnnnnnnnnnnnnnnnnnnnnnnnnnnnnnnnnnnnnnnnnnnnnnnnnnnnnnnnnnnnnnnnnnnnnnnnnnnnnnnnnnnnnnnnnnnnnnnnnnnnnnnnnnnnnnnnnnnnnnnnnnnnnnnnnnnnnnnnnnnnnnnnnnnnnnnnnnnnnnnnnnnnnnnnnnnnnnnnnnnnnnnnnnnnnnnnnnnnnnnnnnnnnnnnnnnnnnnnnnnnnnnnnnnnnnnnnnnnnnnnnnnnnnnnnnnnnnnnnnnnnnnnnnnnnnnnnnnnnnnnnnnnnnnnnnnnnnnnnnnnnnnnnnnnnnnnnnnnnnnnnnnnnnnnnnnnnnnnnnnnnnnnnnnnnnnnnnnnnnnnnnnnnnnnnnnnnnnnnnnnnnnnnnnnnnnnnnnnnnnnnnnnnnnnnnnnnnnnnnnnnnnnnnnnnnnnnnnnnnnnnnnnnnnnnnnnnnnnnnnnnnnnnnnnnnnnnnnnnnnnnnnnnnnnnnnnnnnnnnnnnnnnnnnnnnnnnnnnnnnnnnnnnnnnnnnnnnnnnnnnnnnnnnnnnnnnnnnnnnnnnnnnnnnnnnnnnnnnnnnnnnnnnnnnnnnnnnnnnnnnnnnnnnnnnnnnnnnnnnnnnnnnnnnnnnnnnnnnnnnnnnnnnnnnnnnnnnnnnnnnnnnnnnnnnnnnnnnnnnnnnnnnnnnnnnnnnnnnnnnnnnnnnnnnnnnnnnnnnnnnnnnnnnnnnnnnnnnnnnnnnnnnnnnnnnnnnnnnnnnnnnnnnnnnnnnnnnnnnnnnnnnnnnnnnnnnnnnnnnnnnnnnnnnnnnnnnnnnnnnnnnnnnnnnnnnnnnnnnnnnnnnnnnnnnnnnnnnnnnnnnnnnnnnnnnnnnnnnnnnnnnnnnnnnnnnnnnnnnnnnnnnnnnnnnnnnnnnnnnnnnnnnnnnnnnnnnnnnnnnnnnnnnnnnnnnnnnnnnnnnnnnnnnnnnnnnnnnnnnnnnnnnnnnnnnnnnnnnnnnnnnnnnnnnnnnnnnnnnnnnnnnnnnnnnnnnnnnnnnnnnnnnnnnnnnnnnnnnnnnnnnnnnnnnnnnnnnnnnnnnnnnnnnnnnnnnnnnnnnnnnnnnnnnnnnnnnnnnnnnnnnnnnnnnnnnnnnnnnnnnnnnnnnnnnnnnnnnnnnnnnnnnnnnnnnnnnnnnnnnnnnnnnnnnnnnnnnnnnnnnnnnnnnnnnnnnnnnnnnnnnnnnnnnnnnnnnnnnnnnnnnnnnnnnnnnnnnnnnnnnnnnnnnnnnnnnnnnnnnnnnnnnnnnnnnnnnnnnnnnnnnnnnnnnnnnnnnnnnnnnnnnnnnnnnnnnnnnnnnnnnnnnnnnnnnnnnnnnnnnnnnnnnnnnnnnnnnnnnnnnnnnnnnnnnnnnnnnnnnnnnnnnnnnnnnnnnnnnnnnnnnnnnnnnnnnnnnnnnnnnnnnnnnnnnnnnnnnnnnnnnnnnnnnnnnnnnnnnnnnnnnnnnnnnnnnnnnnnnnnnnnnnnnnnnnnnnnnnnnnnnnnnnnnnnnnnnnnnnnnnnnnnnnnnnnnnnnnnnnnnnnnnnnnnnnnnnnnnnnnnnnnnnnnnnnnnnnnnnnnnnnnnnnnnnnnnnnnnnnnnnnnnnnnnnnnnnnnnnnnnnnnnnnnnnnnnnnnnnnnnnnnnnnnnnnnnnnnnnnnnnnnnnnnnnnnnnnnnnnnnnnnnnnnnnnnnnnnnnnnnnnnnnnnnnnnnnnnnnnnnnnnnnnnnnnnnnnnnnnnnnnnnnnnnnnnnnnnnnnnnnnnnnnnnnnnnnnnnnnnnnnnnnnnnnnnnnnnnnnnnnnnnnnnnnnnnnnnnnnnnnnnnnnnnnnnnnnnnnnnnnnnnnnnnnnnnnnnnnnnnnnnnnnnnnnnnnnnnnnnnnnnnnnnnnnnnnnnnnnnnnnnnnnnnnnnnnnnnnnnnnnnnnnnnnnnnnnnnnnnnnnnnnnnnnnnnnnnnnnnnnnnnnnnnnnnnnnnnnnnnnnnnnnnnnnnnnnnnnnnnnnnnnnnnnnnnnnnnnnnnnnnnnnnnnnnnnnnnnnnnnnnnnnnnnnnnnnnnnnnnnnnnnnnnnnnnnnnnnnnnnnnnnnnnnnnnnnnnnnnnnnnnnnnnnnnnnnnnnnnnnnnnnnnnnnnnnnnnnnnnnnnnnnnnnnnnnnnnnnnnnnnnnnnnnnnnnnnnnnnnnnnnnnnnnnnnnnnnnnnnnnnnnnnnnnnnnnnnnnnnnnnnnnnnnnnnnnnnnnnnnnnnnnnnnnnnnnnnnnnnnnnnnacacatgaaaaaatgctcatcatcactggccatcagagaaatgcagatcaaaaccacaatgagataccatctcacaccagttagaatgacaatcattaaaaagtcaggaaataacagatgctggagaggatgtggagaaatagggacacttttacactgttggtgggagcataaactagttcaaccattgtggaagacagtgtggtgattcctcaaggatctagaactagaaataccatttgacccagccatcccattactgggtatatacccaaaggattataaatcatgctactataaagacacatgcacacgtatgtttgttgcggcactattcacaatagcaaagacttggaaccaacccaaatgtctaccagtgatagactggattaagaaaatgtggcacatgtataccatggaatactatgcaaccataaaaaaggatgagttcatgtcctttgcagggacatggattcagctggaaaccatcattctgagcaaactatcacaaggacagaaaaccaaacaccacacgttctcactcataggtgggaactgaacaatgagaacacttggacacagggcggggaacatcacaccccagggcctgtgtggggtggggggcagggggagagatagcattaggataaatacctaacgtaaatgacgagttaatgggtgcagcaaaccaacatggcacatgtatacctatataacaaacctgcgcattgtgcacatgtaccctagaacttaaagtataatttaaaaataataataataataaaaatacaaaaatttgctgggtatggtggcttgcacctgtagtcccagcaactcgggaggttgaggcaagagaatcgcttgaacctgggaggccgaggttgcagtaagctgagatcacaccactgcactccagcctgggccatagagcaagactaaaaaaaaaaaaaaaaaaaaaagaagaataaaaaaagccggagtgactgaatgaggccgcaggaagcagaaagcaggttgcaggctgagaatcctgttttctccactctcagctcaaaccagaccccctgtcccacagctagctccccagggaaccccgtgtccatgaagtgagagaaccgtattagggtcgggcttgcctcttgccctcatggaatctggaaggacatcctgcactgagaagggtgtggactgggactgggagtcctttggggagtggagactgcaccacctttatctctctcatgcccagagctgggtcctgcacagcccagctgctcagtgactgagggtgcactgtatcagggggtttccattcaggaggccggggctgagggctggccacctctgccccagtgtcacctgatgtagcaggcctgctagggaaatccacaccagcctgccctagaattctctaggggaaacttcccccatgactgtcccaacaatagagagcatcctcccgctgtcctatcccattcagcctagtttctaaacactcacagcctggaattgtcattacacacatgcccccacatatgcacttgcacagcaaaaatcactgcacagttgtgtattcataaagaaaagccagcagctagaagatttgttgttttcactgcatctgactttgtatgtttttctatcatacagcaactcactctcaccttgttgcattcatgcatgtgtggagaccgcagcctcatcgcatacccactcacattccacaatccctctctcttcactgcagatgatgcacttcctccaccagcactgccttcccaatcattaacaaagataggtgtggagaatacagatgcttgcaggggagggatacgttcctgctttatggaaatctctgcagtgggttcagtttacttgactgaatagaataactgcatgcatagtgtacagtggttagagcatggcctctgggccacactgtctgtgctcccatcctggtaactggctccatgaacattggcaggtgctctgtgcctcagtctccccatcagtaaaatggggatggtgatcatactatctgcttcttagggttgtagtaacagtgccacgcttgggcagtgctggcacatactgcatgctgggtcaatatctcctattgtcatcatctttattcttggcccttttaggagtctgacctcccctgagctggggatgtctctgaggccttcccagagacaacttcagtttcccttcccacaagcaagctgtttccatttgattttccacatggcttaaagtgctcattatccctctgtgatctgttctgccagcagtatggtgcaccctggtatggggccccctaattgccaataaaaggggctgtcgcgaaggattcagcagtgtttaagtgctaagaacaacccactgaaaaggatgattgtttttgataaggcttctcagaaccttggcatttcagcaaccgggggggcagggcctggatgctgtcagggctggagaggatgctgtgctcagagggaagctgtggttaccagggccaaccatggaattgccaactgcagaatgttctttaagaggccactgaggttttgatgggtagctgacagtgcccagccactgagtctgtgcgaagaaatatttaatgaatgactctgggtcccaaggctaggacgaggggtgaatgggcaggaagatacaacaaggaagtggagccacggttcccaccatcgaaaggggagagagttaacagaaagtgtgttagctgagtatttcccaaagggggttccatggaaccctagtcctgcaaaattctctgtggaatgaaaaggaagagtgaggtagatttctagccaaaaaccttgggaaagaaatattgcatactccacttccacatatgtgaagagttaacatccactgaagaagttctgcaataaaaatttcaacatcgtaacaattttctacattttaataatgtattagcagtcttatcattcagtatataccaaacatttgactatataatctttttgatttttttccctgttaaaacttgaacattttgaggaatgaggaccatttagaggaatgaggctttctgaaagcatcgtctgtgaaccatcccagctacactaaatttaaaccaccaaccctcccttctctcagtgattctgatgcacactgacatttagagccaggggattggtgcttccagagcaccccggggagctctgcagtacaacaatgacgagaggaatcagctctgcacgggagtgtgcagggtacgtgctgtgaacggcatgtgctatgaggttcacagggtgtgggctgctgaggaggctgcagagctgcagagaggaagagtcctcaactagatcctagcaggaaggaagactcatgggagtgggagggtgtggagagaacattcttttgttttcactgagtccaggaagagtatagtagcctaaagtgaaatataactccatacatgctgctgcttcgtgtgcccttgagaggcaagtccaacgcttgcctgggatgagccgagcttgggtccccttcttctctgtcctcagcttgacagccacctctctgtatgggtcctcagtgtgagccagaggtgagggtggtgggagagagaggtgggtctgtttcctggtgagaagttccagaactcaggtacagtctgcctgtgaggggtctgcctgcaggcacctgccttcctgcttctctgacttctctggcttctttggacattcgagggtttgtagaacagctgacacatgtatgtgtatgtgtgtgtggtacatgtatgtttgtgcgtgatgtgtgtgtatgtgtgaggtgtatatgtgtgtgcatggtgtgtatgtgggtgtggatatgtgtgtgtgtgtatatgcctgtgtgcatggtgtgtatatgtgtcttgtatgtatatgtgtgtggtctacatgcatgttgtgtgtggcatgtgcctgtatgtgtggtgtatataatatgcatgtagcatgtgatgtgcacatatagttgtagtatacatgtataccacatgtatatatgtggtgtgtgcacgtatgtgtgtttggtgtgtggtgtgtatatgggtgtggtgtggatgtgtgtggatggatgtgtatattgtataagtgtggtatatatatgcatgtatgtgtgtagtatatacatgtatgtgtgtggtgtgtacgtgtgtatatgtacgtgtggcacacattgtgtggatgtgtgtatgcataccatgcatgtgtgtgtatgtatgtgtgtctggtatgtatatgcatgtatggtgtgtattatgtggatgtgtgtggatgtgtctgtctagtatatgcatgtgtgtagtattgtgtatatatgtgtctgtggcatatgtacatgtatgcatatgcggccctgtggcatgtgtacatgtatgcatatgtggcacttgtatggctgtaagcatttgtctggctccagagccacgtggcagggctgggtgacagagtggccacttgggtgctcagcccagggcaagtgggccctggggaaggacatgtgaaaacgttgggctcctggttgtccagtttagcttggcagttaataactctgttgcgtgaggcctggccccctgggcactgcctgggccaccacctcagcatcaagggacagcaaaggaaagctctgcaggtgagactcttcctgctctgggctaaggctggaaggagatggatgtcttctccacgtgctaggctatttctccagcccctgttgatgaaagtttgcctttagtggttatatgcctgtcttgtgccattgaaacaaaccccaaggaggtgtccagattcttgatatgcactgcagttcttatatcaagtagagtggcaataaggagtgcggcccctgtgtccaaggtgttgccctatacctacttctccagagactcagcttctcgtctgccaggccccgagtcttcatggcgatctccttcctgatattcagacagagaggcccgatgccttgcccactgctctcctccatgtgtccagctcagcggctggggtcctcattcttctcagtgctgtcacctccacctgctgcctcctccagggctgctgagcttcacagctccgggggtgctgtccatatgatattcgttcctggagctgcacccccagggctccctggagctgtgcaaagatggggtccggctccttggtttgtaaagggctcaccttgctggcacttttgttcctcagctctgagaatcagagttgcagtcatcacgggggagggaatgaggcaggaggccggtcagtgtgagagttaacaagactcaagccttgtggcaaaggagaggtgagacccggcccaaaggcccaaggtgggcttggggcagagacctgtggggcagagcgagagaggaaggagaagcagcctggtgccgagttttccagcctggggagggagacacaggagtcaggaggctgagccacagggcgggggtggctaaagaaatacggtgtgtactgggaatggcagggatatcgctgggtttcttgtcatttaaatatggatgtaggctcttgatgtcgttcagggatatgttccctgagttgttgtaaggagttgtggggattcaatgaggaaaatgtgtgagtctgtcacctgtgacgtgtgtcgattgtgtgactgccatggctcttggaggagcactggttgccaccgtgactccaccacctgctccccagctgggccatggcctctctccccaggctcctctgggaatggcagggatatcgctaggtttcttggcatttaaatatggatgtaggctcttgatatcgttcagggatatgttccctgagttgttgtaaggagctgtggggattcaatgaggaaaatgtgagagtctgtcacctgtgacgtgtgttggttgcgtgactgccatggctcttggaggagcactggttgccaccgtgactccaccacctgctccccagctgggccatggcccctctccccaggcttctgtttttcacccccaacatggagatggcagcagctgatcacagggctgttctgcagatgcacggaagggtgggcttcctctgtaaagaataaacacatacatgcaggcacagcttctgccctggctctttccctcccatcagctgggagcacatttccctgaccccaagaatctggaagtccagagattggtgggtcccccgccagggatactgctttggaaatgcccaagtttgccctgcccagtcacctcccttagcccaagggtagtgccccctcctccaggcagagaggttccaccagctctctgcacaggggcattggccccctcacagctgctgccagtgactgttactgtgacctgtcctcgctccctgccagttgaggagtagtagccaagatgccaacctgcaggccaggagggagatttatgtgcccatctgcactgcccttcaactgccttcaaggtgaatcaccatcttcctggaagatgctttgcacttctaggtttggccatgaccttctctacatagttgctctctctttctatctctccatccatgtttcttactctctaagggccttacgggcctcggatcctaggacggtaaatcattcttgacatcctaatcttgattcagtctttcagccacagaggcagtagggtcgtgcttcctcctgttacaaagtggcatctcctcaatcagttggcaggaatccaagctggccctcctgtgtgcctggcttggccactgtgggggcacaaagagaaagaggcagtccagtggaaaagattacagtctacttggggaaggtctaacattcatgtaagagagcagtgaccaagaggtgatccactgaagctgaatttataggcgccagagaacattgggtatttaacagatcagggattagggaagacacgtgtggaggagaggcttcaggtcactgggctgaaggaggaaaatgaactgcatgctgagtgaggtctgcaatagatgctttggaagcaagagttttgtttgcatgtatgatttttttttatctttgctttctatgttatttttggctgctatccccaatgataattacattcgaggcccaggagggggttgtgaacaagccggtcaacatctcgggaggcaggggctgtccccttgggggttgtgtgatagaaggtgagtctctctagctgacctggagtttcagagttgcacttggagcaagcagggccccaggagttggaatggggaggatgtgaggcaactcgaagaaaagggagagaggacgatcctagaacattaggggccacctgcttggaggactggcaaccatgctgtaattgattagtgatatctgccgctggcaggagaggggatggtagcagcacgcatgccagtcagaaggagcccatctacagggcatggtatttcattctgggatctctttatttaaatatgaagaatctgaagtccagactggtgaagtgactttgccgaggtcacacagtttattgacgcaaaaagaaaacgcatgtttaaagaagatggtgaaaatctcttgcagtatatgtcaggagcactgagcttccagctctgggggacccagggggtccctgccatcaagggcccgctatctcctgtgggagagaggtcactacaggaaatagaagtgagaactgcaagaggccggctctgctactgtaagtcacccacacagatagcaagttcagggcagagcgaggtgactgcagtttgggaggccagaggtgcttcctggctgagccaatctttgacagatggggcacattcggagagggcaagaggggagcaaggcccagttgacaggccatggtcaggagcaaaggggattacggggatgggacaggaaaggcatggggagaagcacccagggccatggcggccctgaataaatgtggctgatctgctagaaaggattgtgcaagctctcagggcagcctggaatgaggaagtttcaagttacttagacctgcaggctgcaggctgttggtgcccagagagagggaccagtcttcatgttatcaatgagacccaggaaggctgagggacttgcccagagtcagacagcccaggtggttctccccagacagtcctcttgtcccttcgactccataagccctccacctctcctccaggctctcattacctcctgcctcctgtctgtggcggctggagtgcctggccccttctgcttggaggctggactgtccagcctttccggtttttgtgccctctccttctagttaatcaaagctgctcgctctctctgtctctctctggaagagagattggtttcctcttccagttactatctgagttctttcactatacattcgttagtttgcctgttcctgaacataattggttctcttttgcatctgggttcttttgttccctgtatgcttgtgatatttattcatattgctgcatgttattttactttgtttgtgctcactgcggtgtgatactccaatatgtgaacataccacggtttatttatcgaatcagctgatgacaggcatgtgggtggtctccagtttggagctgtaatggcggatgctgctgtatacgctttctgtacatgtcttttggtgagcatcgggcacatttctgtgtgtttatacctgggagtgaatttctgggtcatacggcgtgcacacgttcagctcaggtggatgtggaagtattgttttaaagagtgtgacgatggaaaccagattgcaggggtaagaagggctggagggcatcaggtgcggtcaggggttggagaatttgccagggagctcaccagccagagagcagagaaaccaaatcatagaagctgcattgagtaaagaggtttctgtctctggggtgggtcacatagggaacactggaggatcggctcgactcagagaaatccagttgctggtgtagccttggtcggtgggggcttctggggagtaggactgaactgtgaaggaaggcagcctccatgggctccccagtgggcctggctctgcagagcccctccctggggagaagcctcagccatcaggctggcagtggtgatggtggctctgggtggtacagagcccttgctgggtgtggaggctttgaggagagagccatgggcctggggcagcaggggcctggacccttctgtatacatctataaaacctcagtgaaacgagggcctatgcctggggggaggccaggagacccccaggcagtcccctgactctgactgggtgcaccagccaccatactcacttgggggctcactccagccccccagcccctcaggccctggccccgtgttctcagcatcctggccgagcaattaatgtcagccctttcacccccatctcttccagaatggcagcaaagacaactctctggacatgctgggcacggacatctgggcggccaacaccttcgattccttcaggtaacctcctcctccctccttccctgtggtgtgaggtccagccggggaaactggcttccttggggacggaatgaacgctgatggttcatgagcaagaggcagagagaagcagagtaggggatgtaggaaggatggggtggaaagaaggccggagagaggaggcggtgagtgtcaacgggagacagtggaggcatggggagggcccccgggatggggctgcagaggctgggccccgcttcccactagcctgcctcatctacctcagggtggccgggtcgtcactttgagctgcttgtcagaggctggagactggcatttggccccttgctctccctggccttcctcaaatgtgggcacgaaaacaaactcaggtgttgcagaggccgctgtgcaatgggcatcaggcccacacttgtttcataagcatgcactttcccacggcagggtgaggaaggtgaggggtggcacctggggctccattctgagtggggctccccgcctggcccctggcggctcctttctgcggatctgctctgccaggttcagcctggccccctggttccgtcagtaactgggctgttgccctcttgcctccgtttctcaccctccctcgccctctagtggtgccacctgggacctgcagccggaaaagctggacttcacccagttccaccgcaaagtccgacacacgcccaagcagcccctgccacacatcgaccgcgaagggtaaggggtgctggggctcttacccagggtggggtggggcaggggacgggagtggcctttgcctccacagggaggctgctctgctgcacaggggactcaggtggctgatgccccgggatgctcttcttatgcgtcccagagctgcaggctcactggcttctcctggaatccctccatttccctctgcccagccccctctagccatgccatccccacctgctcctgatgacccacagtggccctgcttgtcagtaatccacgccagcgcagcagaatcacctgggcggtggcacagaggacaggcccaccccagagtctgtgattccgtaggtgtggactgaggctgtgtgtttctttctttttttttttttttttgagacggagtctcgctctgtcgcccaggccggactgcggactgcagtggcgcaatctcggctcactgcaagctccgcttcccgggttcacgccattctcctgcctcagcctcccgagtagctgggactacaggcgcctgccaccgcgcccggctaattttttgtatttttagtagagacggggtttcaccttgttagccaggatggtctcgatctcctgacctcatgatccacccgcctcggcctcccaaagtgctgggattacaggcatgagccaccgcgcccggcctgaggctgtgtgtttctaacaagttccccagcgggtgctgatgctggtccagggaccacacttggggagcagctggtgtcatgcctgattttacactggcttttctcaccctctatgactttgtgtggcagggttgccttcccttttcaaaagtggtgtcacagcctgggcagacctcaggacgggaatgtgactccagcgagacacagaggtgtgggacaaatggctgctccttcttttatagttttatataatttttaatgaggcagaattcccataccataaaattaaccattataaagtgttcagtccactggcatttagtatgctagacctgttgtgcaactaccatgtctatctagttctgaaacattctcatcatcccaatataaaaccccatacccactaggcaatcattccccatcccatcaccacccccagtccctggcaaccaccaatctgctttctgtttctattaattaatctattttgcatacttacagaaacagtcatatgtgacctcttgggcctggcttctttcccttggcataatgtttttgaggttcattcattatagcatgtagcagaactttattccttttcatggctgaatactagtccattgtatggatataccacaatttgtttacccatgcatctatcaatccttacttgagtcatctccaccttttggctattgtcaaaaatactgctgtatctttttgagtccttgcttgtaattacttgggtgtatacctggggtggaattgctgggttgtatggtaattctgttgaactctttgaggagctgtcaaactgtgttccatagcagctgaatattctgcattcacaccagcaatgtatgagattccaatttctccacatccccaccagcacttgtgcttttttttctttcttggtttttgtttgtttgtgttttattatgatactgatgacccttacttttccttccagccctcccctgctcactcttgtctccctttcacttcaggtctaagtattagtgactttactggacactatcctacatctcacatgtcttcctgctgctatatttgtcccactcaacctctcctcttggcaacattggtcccatcatagtgtaatgagcaacaacccgtggaaagaaatgggctcattcctactttagagatgaggaaaataacactcagagaagcaaagtaacttgcctgaataacagagccatcatttaaggccaggccttctgacaccatccaacccctagttcaccacatcagggtattcttaacctccttaaaattttctgcaaatttgtatgtgtgcatgcacacgtgtgtgttgctggggagaggcccatcacttgcatccgactctcccaggagacaccagcctctcacacgcctctttttcattgccctccctgttgtgggttccatttctctttgggtgaagagggagagatggctttgcgcatggaggcactggttaagatggagcataggagagacacagctgcaaggctcccgaccctaccttaccccatccaccctgctcactgcctgctcagcccactcattcagttgcagggaggccatgctccttccagactgctgagctgcacagggctgggcctccacacttctgtgcttaggaaggatggccttacctacctttctcagtgggtcagcttcaggaaggggttgtgagcaaaggtgatgcttgcccagtgtcctgttgcaacagtgtagcggagcttgggtatgccacaggaataggagcaggattttgcttttctcaagttcagtgtagccagtctgtcactagacctgctgggtccctgcatggtgctgggtaccaggaaagtagacacacacacacacacacacacacacacacacacacacgagtatacaatacagtccctgcccagaaggactgtttattctactgggaaaaggaaatatgaacctattcatgatggagactgtgtaggggaagaaagactagactatgcggtgtagacatacagactagactatgcagtgtagacatatagacaccataaagacatatatagacaggtataaagtgtgatgcctggtgcagggttaaataaagtcaatgcaaaaggggttagaaaggagagcactttacaggttgaaccatctgggaaaggcttcaggagggagacttccctgggcagctccagtctctcctgtgtgccccgggagcacatagctggtgacgtcagtggggacactgaggcctggggagatcgaagcgatggtgctgccttattgactacaggtgcccaatggggcctgcatgttgaaggcaagcttgccaaagtgtctcaccagtccccagagatgaactaacttcctagcaaaaaagcgatgaataactatgaaggagaggaattccccttatgccgagggactttgtcccttctgaagccagagtaaccagccacacctgtgtcaccagctgtgggcctaaattcctcggccagtctcactttctcaccaggagcctccagatttgctgagagtcacctggggtctcccatggatatctggctcactagccaaagcctgtcactcccaggttcccagggagtctgagtgcagtgtctgtggccacctcatggccagaccaggaactgtgacccccttagagtcctgctgtagtggggacacactccatgcgccagccactgcagccttcctgggatgcaggtaccactcagttgccaaggctccctgcagcctgtgtttccatggagggacagaaatcagagaaggctgttgccttggaaaccctgttggcagcagtgactcagctggtctgtagccaccttcagccctccaaacctgcaggcctctggggagatctgagccctgacgagggcaggcctcgtgggacagcagccctccctgcaggcctccacctgcccacccccaggggcgctgaggcgagaacagaaagctgtgtttggagtgtgctaggctggtgcccagcgtgtgcttggagctcagtgcatgcgagagagtcctgaggtgtgttttacccacaggagacactggggaggtggtatcagccattctagtcaagccaagtccccagtgccctcctcccctatggcccaggcgggtgcagaacacagaagactacacgcagttggtgctttcacaggccagcctgtctgcaccaggcagattgatgagttaagagatgtttggatgttccgggcctttctccacctgctcacctgtagccccagcacatcacagttgtggggacagccgggggccgggggaaactttttcttttccttcatgcctgttataccttgcacaccattccccaccccagctccaccatgccccttgcctaccccttgcaccctgacccctaacatgctctagccacagcaaactggcaccacacatgctcctaactctaggcctttgcctgcgccgtgtcagcctgggacatcctcccaaattccctgtgcttggccagctcacctctcaccttcctcctgcccctcgcccaagacagttctagacgctgctccttggggttcctgcaacgatcccttgtccccagcggggcacttgctgctctactgtggggggtgattatcccgccagacaccgagaggggcagttgtgtgcactgtttacacctgggtcccagaccctgtccagagccgggcacagaagtgtttggtgaatggagaaatgagccatcaaatggggcttgggttagccccctgttctcttccacccaggcctttgctggtgtttgcagctagtttctcctcctctgggttccagggcgcctctggccataggacttttatgacaccgatctcgtgctgcccccagtggtgctccggcacccagccctgttagaggagtttaggatttgttctaagggccatccactgtctgagggcaggaaccaaaactgattttttttttggttcacaaggcccaaaacagaagagatgcttggtaaatgtttaaacaatgaactagttactctgaaaggtgagattcgtatgaactctgcagctggaaaatgacccaactcatgggacatctctcaccattcctcagtcaataccagtaataatagtaactgacaatacttactatgcaccggccatgctccagcctctgttctaagtgtttgcctcatttatttaaaactcgccaccacccagagagggaggaactgttaccatcttctcttcaatagatgaagcaactaggagacccagaaattgagtaatttgcatgaggctgggttggctccagaatctgtgtccttaattaatcaccctcctgcctctttgcctaaacaacagcaacaatattagtggtaatgaaagtagtcatagtagtagcaatatatttacttcattatttattttaattttgttattattaccagtatttaccattaaacatatgtgtgtatgtttaagatatatttaatggtaaatacagataataatacatacacaagaaatatacacacacacatttataaacaaacaagctaaacatttatatatatatatatatatatatatatatatatatatatatatatataagctagactatatatgtgtgtatatatgtaccgtttactgtgggctgtcacagttctaagcatctaagcactccagatacattcattaatttaatcctccagccaccttaagatgttagacactattatcctcatttaacaaatgaggaaactcatttgatgaaatgagtacagagaggttaaacaacttgtacagggtccccagttggtaagggatgcagcggggattcaaaccctgggagtctggtttcggaatctgcacccttaaatatgccaaagattcagacctctggccagggagttggggccagcctctctggcccgagggcacgcccactcacagaggacatgaagacaaagcatagactatctgagtgggcttgctggactgacccagagtcaagccaaaaaggaaggaagccctattgggttttctgctagcccctgccagcctatgtgaccttgagaaagttgcttggtgtctctgtccactgatcttctgttcagtgtaatggggcaaggtggatgggctttgacaggagttgtgatgagtaaggagcttagcttctctgcctggaaggagcaaggggaactctggttcctctcccacctccctccaggttggctgttgcattacgggaggacccccccccacacacacacagcttctctagggctgtttcctctaggtgggacagcccctgcagggcttgagggtgggcagcaccaggtatctgctgactgtccctcctctcctgctggccggatgggacaggaggcatgaatgagccatctttccaatgcctttctgtcttttctggtccaggtgtggcaaagggaagctggaagatggggatggcatcaacctgaatgacatcgagaaggtccttccagcctggcaggtaggtgcaggggcaggctctctaacagcccacccccacccctggagtcctgatcctcttcctggacaggacctaaccaaagcactccttctggctgcttgttccagcaaggagtgtaaccgcctgtatggtagtaataggcagggctggctacctgccattctccagggtgtcccattgtgatcgtgtgtgtgacagcctactcggtgatgctgcaggccctgctggcaggcctgatgtgccctagagatgaaatagaccatgccctggcaactcagtgaacttggaagtttttgtcccttggcctgaaacctctctgcaggtgaagtgtcctgtggtgtgttcaggtgggactggcaggcctggaagagattctaatgtggctggggctgtctttaggcttttgaacagtggacttgccctgctggcctccaggtgtctgctatgcttgctcttttttttattgattgggcctctttcctggaatcaggccaggttccaggacaaagaggattcactcagtgaatccaggtctctagatacttatagtgctggacttttggtggaaacagcaggagtctagctgctctcaggagtgtgactgggcctgctgcaggggtgtaaaagcagtggaccttccacagtgactgagtctgccgctgccagtgaccatgacctaccaccacactccactgtgccacccttcccttctctcctgattcttctcctgctattttatctatatccattcatctcttcctggtgcctttgccattttgtttcttctctgttcatgccttgggcctatcaatgagagacaatagagcatacagttaagacctcatctatttgattatgatgtgccttggtgtggtggttttcttcatgtttctcccacttgggatttattgagtttcttggatctgtaggtttatagtttcatcaaatttggaaaattttcagccacgattcctcctactttccctcaaccctggggttccaattgtatgtattctatgcttcttcatcttttcccatggctcaccaaagctctgcctgattttttaaagtctttctttactctctgtgtttcattttggatagcttttattgctatttcttcaagttcactaatattttattccagtgtcaaatctactgttaatcccattcagtatatttttcatttcagacattgtagtttttatctctcgaaggtcattgtgggcttttttaataaatatatatatatatatatatatatatatgtatgtatcttctcttcctcatgctttcttttctgcagcatatagaacctattcccaatagctgttttaagtccttctctactaattctgtcatccatataatctctgagtctatttctattcattgatttttctcttggttatggggcatacctttctttacatgcttggtaatttgatgttaaatgtcatatgttagaacctttacattattgggtgctattttttttgtatcactttaaatattttgggttttgttctggatcacagttaagttacataaaaacagtttgatcctttcaagacttgcttttaggctttgttagggtgggaagactttagtgtagggcaaattttgctccactgctgaatcaatacccttctgagattgccacccaatgctctgtgtattaggaggtgttcccccctggctggagaaacacaaactattttcagccgtatgtgatctcagtggattgttctatctattccttgcctcagaagtttccttacacatggacaaattaatactcagccaaagacttgagaggctaagatttctggatttatctctgtatgttggtctctcctctttagtactctgccttgcaaatcaaattgtcttggactccgtggattttgaaccctgtcatcttagctcattgagaccactgggccctggactgccctccctgtgttgcagactggaaactttccaggcaatgaaccagggcacacatagaggtcacctcattacaaagagaaatatgatgactttatcacggagaaacctggaaggccccaacgtgaccaggtgatcaaggaaacatcattagtgatgggatgggtggacactatgtccttccttccaagaaagcatagcctgagtctggtttttggaaatcagtataaggaccactctctataactgcttggacacaaaagacagggaaagactgaggaagtcttccagattgtagaagacagaagaggcaaatgactaaatacaacttgtgttccttgctgaaatcctgaaccagaaggaaatgctgaccttgctgggacagttggagaatgtgattaggtctgtgggtgggacagtagtgttgcttcgatgtcagtttcctgacttggaggcggtgttggtcatgtgggcgagtgtgcttgactttgagaaatacacactatgatgtttgagggatatgggcctggtgtctgcagcgtctcctcaaatggtttagaaagagattgatgataatggtttgtagacacagaggaagagaaagggcaaacatgcggaggtgttaacagttggggaatctgagtgaggaggacgtggatgttctttgtacagttcttgcactttcctataaatttgacaggaaaaagaatcaatcagtagggccgaggctgtgatgtataagtcacaggcagagtatcagctcatgaaacaccctttgggctggatctatattaaattatcactgctaatggaaagccagccttgacgcaagagaaaaaagggtaaggtactcgaagtgaccaccttatcactccatttctaaatgccaagagcattcatcattgatagaagaagtacatttgagagaccccgatctaggtgagaaaccagatgccccctgcactaggcggggtgttgaccactcggtaccctttgagccagaagcttgggagtcatggctggaaaagtaacagatctgacgctttgtgttgtttggtgactgtttcttcactcctctagggtacaaaatggaggacctttggttcctgctcagacgagaaaggagagctgggctgctggctgggtgggaggttggcggtcaagggcttggtgtctggacccaggcatagtccccatggaatcccagccctgccattgactagcccaggagtctggggctagctacttactcgcactctgcctcagtttcctcctctgtaagatgagggaaataaccatatctactttatggggcgtttgggaagatcaagcacattccttcacttgaggtgctgaggatgatgcccagcgcacagtgggtgctgtgttggtctctgctgtaattattcccgggactcaacaatgccagtgaagccccaccttctgagggtggaccaggctatgggggccccctctgttaagaagaggaaggagggggtgatttcctgctcctacccccaggtgagttgtttcttggtgaagagggcaattctgctgggcaaaagctcagatgatgaaccttggctcataggttaccaaggccctggttgattcttctcctatgcggcctgacaggcagtggagacagattggactagaggtcagaagaatccacttctggatgtctgccagagccgtgtgtgtgacctctcctctgtgggcctcagtttactcatcagcataatgacacagttgtattagatcagaggtttgcaaactgtgaagccctcaggattctcctgggttgcccctgggtgctactggggggaatagggaggcggaagcagccagttctaggggcccccacttgggcccacccagaactgtttggctggtgcctctaaatcaggattctaacgtggtttcatgtaaagaaacaatcctactactaaacaaactttgaacatcatcagaccaaggtcctctgaggtttcacattctagagttttcttttttttctcaagggacggtaaatcagtgagaattccgggctctccagggcccacatgtgatgctaagctcttaggggcggctggtagtggaggccttcacccaccgtctccaccgtcaggctggagcagaagggcttggatattcgtgcgcgcgcacacacactcttacacaccatctatcacacacacgtacacacatacacacaccacacacatcaaacatacacattacatatcatacacctacacatactcactgcacataccacacaccacacatgtacatacacacatatacacatcacacacatcccttcacaccctacacacacatacactacacatgcacacacatacatcacacacatatacacccatatatacacagcacacacacacacacacacacacacaccccacatgtttccatgacacacactttggatgtgctttgccctcagtgaactatcagcagatgaatctgaggccacggtgctggagctcagctgcatgtcggaactgcctgggaagtgctgaaatctacactgtctgcccactgtgttcctcatttactgttgtgtaacaaattgctcaaaacttactggcttaaaacaacaaagagttatgatccacacactttctgggagcagcttagctggtggttcagactcaaggtctctcatgagtttgcactcaagctgatgaccagggatgccgccatcagaaggcacacctgggctggaagaccccctcctgtgtctgaaggcaggaggcttcagttcctccctggctgggggcaggaagcctgggttcctccctggcttccttgccacgatatctgcataagctgcttgagtgccctcagaatatggcagctgtctttccccaaagcaagtggtgacggggggagagagaagactccatcgcagaagtcacactcgtttatagcctgatctcagaagtgacagagcttcacactgccatttgctgtatgtcatttgcacagaccaaccctggtacaatatgggaagggcctacacagaggtgcggatccccaaaggcaggaatcatggggggctcctggaggctggaggacaccctcactgaatcacacccaggaatccatttctttctttttttcttttcttttctttcttccttccttccttccttccttccttccttccttccttccttccttccttccttccttcctttttttttttggagtctctctctggcacccaggctggagtgcagtggcacaatcttggatcattgcaacctccacctcccaggtacaagcgattcttgtgcctcagcctcccaagtagctgggccacaggtgcccaccaccatgcccagctaatttttctatttttagtagagatggggtttcaccatcttggccaggctggtctcgaactcctgacctcaagtgatctgcccacctcagcctcccaaagtgttgggattacaggcatgagccactgtgtccagctagaatctgcatttttaaagcattgtaggaaattctgattatcagcaagagttgaaaacttaaagtcctggctgataatgctcctggcttgactgctccttggagtatctacaattcacatgggtacccttaggacaaggtagacaggcttcttgatccccaaacacagacttttggtgtttgaggaatttgcggtcctgtgagagcacaatgggatgacttatctgagttttcctagtgttcttcaaagcccctcataaatagggctggctggttcactcgtctggccttgggtcctgagggtcagctggcctagctattagcatatgtggtggggacaactcttaatagtatggacgtgtccaatgcaatgtgggatatttaggactcctggcctctgccactgaatggccgtcactggagaggggcaggcatagtgaccaccaaaaacatcctcctacttccagattcacctaggagatattgtgcatccagctgaagacccccaaatgggagggaaagcccacctctagcctgaggacctccagccctcctatgggagtcttgagcctgtacatagataagcgggcttcctagagactttcttagacaaaaatcagggctggcctcccctccctacctggaggcaagaaggaaagagggtgacaaagggaggttggcctcaagcccattgcctacctgccctccacttctgcaccccagaagaagaggggcataaagatcctaccagctgtgtccccagcatgttctcaacccacagaggcccagacccccatctccggccccttctgtccctgttcggactccttagcaggcaggaggctttgtgatgttctcagcacccttgcccagcctctgtcctgggctccccctgccatcctgtggccctgtcagtccctcccctgatctgttctgatcttccatctctccttgctttctcaccagcaggcggttccctctgcctaaaatctcactcagcccttctctgcctgtcctttttctggctcaggatacctcccctgatccctctcagatgcacaggatggagtccagcatccacctgccatttccccagagcccctgcccccatctctgtggcatggctcccaccacgtcgcacctgcttacataactgccagactcccttcctggactctgggctgcctgagggctgggccatttccttcagcctcataaccccagcaccaggtgctctagagtgagtgctgctgaagaacctcctttctagatgtgctgttgtgttgtctagagtgtacaagaaaggcaggatttgtgtctgtcttgacactcagtcgtccctctgtctctgagtttctcccaccacttcccagcagaaattcagcatgaacctggttatgctcttctcggtgtgatttctgagacacattttgttgttgttgttgttaaagaaaacaggatttttccatcatctcctgtattaggacactataggccatggcataatactaaacaaaccccacatctcagtggaatcacacacagaattttatttctaactttctgaaattctgctgagggtccagctggtctccagggtagctccttggggactccagggtccaggtggattgcgttctgtggccctgccatctcaatccatggtatccaagtggccctggcacaggcaaagagagctggagggtcgtgttctaggtcaagcttggccaacctgtggcccaggatggctttgaatatggcccaaaacaaatttttaaactttcttaaaacattatgaggtattttacaattttttgttttagctcatcagctatcattagtgtattttatgtgtggcccaagacagttgtttcggtgtggcccagggaagccaaaagattggacacccctgctgtatgtcttaaatgctttggcccagaaatatcagctccactcagagcccattggacagaactagtcacatgcccccgccccaactgcaagggctgacacttctgcaggggagcgggaagaaggggagcacatggctgttctgtaagcctcaagtgcctctgccaaatcttcctctttccttcacttgctcacttaactcatcttcatggacaagtgctctgccctagccttttagagagagagaattgatcacataagatacagttccccacgagaggcacagcctagtagaggaaatgagacatgcacagattaccacatgcattcaaagctgcaaatgcccgagcaagtgctggtgccttgcccaggtcacagtccctgaagggcaaagtctgggtcctctcccagtacaccccaccttcctcccctgtgctgctgcagctcctgcagtctggggcgtgaatgtgtggctgagtacaaagcagagggcgccatgggcccccacactgaatgcctgttgatctcctgggagccctagcttatctctcagtgggttacacacagagcgcatgccacaatgagtggttttaggaggtgatgcctccactgggggtcagatgctgacacctaggcgtctggccaagctcctctccagccaaagccaaggcccctattcctggtgactccatctggctgtgtttccacaactggcaatgaatccaggggtgagtctcactgcagtgctgacctcaggaacttcatctctggggctgctggactcaggctcttggagcccccacaaggatgtggggcaacagggtagacagtaggtgtctgtgtccagggctcaccctatacctctgtgaacccctgctgccaggaatagttctgcactctgaaaaggcatttagtgagctagttaagtaaagggtctgttggtggtgttaactgtccccaaggtcttccttcccacactggtggctggagggaaaggagcaggtacgctgggataggagctagccaatagccaggttttatggcatccacaccgaggcatgacatgccatacaatggcagcctcaggccagttgagactgacattgctctctaagaacactgatggggtggtggggggtcggcgggggtggagtgggtgggagatggggggcagcagaaggctctgagtacagggccatggattcagggttcaatcatggttctcagtgttgaagccatagggcagggcggacactgagacacacacttgggctcagactgcagttctaggggacccccaaattccatccacaaggctggtgtcctggtagcatttttggcatctctatcacaggagtggaggggttggccaggctaccactctgtcagtgttgtgggcagcccaggcccatcattaacagtcctgctctgagtgtggccccagtgttgaggactgctggagtggaggcctcgccaggatcggtggctgtatggtggtgtgctcccactagagggcaccagcgcaccactctgcaggctccagcctggtgcttgctgtgggaagtcccctggtcccagcgccagcagccaaaggcgtcttcaccggccatgcctcctggtcagcgctgcacatgcacactgtcctgaaaatgaccccactcaatgcccaggcccttcctccctgcagcaagtgggaggatggcgaggtgcaagaggcagccacactaaggtgtagggaagctcctgttgggccacatgtcccctgctaggccaaggcatgacactcctccagagggcccgcccctccctgggacccctgggaacacactgcttccaggagggcagcagcacggggctgcaggggaacacccactggggtggggctgggggagttacaaagtgttggcttccgcccttggaaggatgggggctggctaagtggggagatggagccgcataatctgtaatccatagtctaagccgagttaatttactaagttctgaattaacttgactaagttccaagttaacttgaccaagttccatgtgaaggcaagggatgaaatccgaattgcatatccttcacctcatctctggtctgagaccaccccccggcaccccctcccccaggacccctttactctgaggtgtgacttggggagcaatttctccatgtgtgtgaagtcggcgcgaccagtgtgagaaagacggtctaacgggcatgttgtccctgtgccctagatggcccctaggtgagcattagatttcctcaggttcccgggcacagggccctcggcgccctgcggaaatgccacctccttatatcacacagtggcctggtgcttttgtgtcatatacaataccccattgaaagacgttgtttgttgaattatccagtgtcctgcccagggctttctatcaggacgtattttggtcattatccttgaattctcccagacaaacattatgtctgctgtctttggtctgacagtaggaactacataacccactgacttctcgttttgcctttctcttaggaaattttgaaaccaaattctgtgtctgttggccgttaatcattagatggctcagacctagcagggccggctcccctgcccccacattgctggccttgtccagagcgtgtgactcaggagccctttgctgtgaaaggggcttagtgcccacacaacagtggacgccacccggtcaagtgggatttctggccttagggatgtgcccaaagcattccccattgagggtccccagaaggctcaggggacggaaagtggctttctggcctcctgagcctgtgtccaagtccagccttcacacgggagacggctaaaggaagggacagttccttcctcgttcttctgcttggccctggatgataacagagagatcctccccactacctctctaaagaatccgagggacaaatgagctttcaaaatgaaaatcatggctccatgaaatgacactcaggtgtccctcactcctggaggagtgaaaatggtggccgataaggaatggcctggcagccccagcaggtggcgctgctgctatttagtaatgggggtcctgggcgggaggccggggccgcggctggggctgccccacactggggttgaagcctctgtagccgggttcccagacctccagatgagaaggagtaactttattgttccctagggctgtgttagctgttgccaagtcttctggaaacttctaggacatgctaactcacaggcgtgaggattagtaaagtgccccgagacacccaggagcagagtcctgaaaaccatgccccacctcgcctccccaggccctgtgcaccggcgactgttgctccatgtcacccgtggtcccacggaggtgaggtctgaccttattcacccaggccaacattacggatcaggcatctctctgtgtcccaggcattgtcttatagccattatggactgagtttaagtgcaggggctggtacctgtcccatagacggggacatggtattctcctaatgtccccttagtgagaattcaacaaggagcgtaatgcaccaacagtaacactagcgaacattcacagagtgctttccgtgttccaggaactgagaaggtccttgctttttctaatcttaccctcacgttgtcccatggagcacgtactgttattgacctcactttacagaccgatgtctttggtcggatgtaaccttctcagtaagggcttgtgaacactccatatgcctcctcatcactcaagaatcgtcactcgattcttccctgcagcgcctgtcgcatgtttgctttatttcttttgcgtctgtattctcccagtggagtgtacgttcccctggggcacatctaggggctcattaaatatgggttgagtgacttgctcctgccccagagggactcccacccagcatcttagtccagaacttgtgcctccaccacagaggctaccatgacttgagtgctgtctgagctgcgggctgcatatactatctctgaagtctcacaaataccctgggaaatgtttattctattattatttcacagattggagaactgagctcaaataccttgcctcaaatcacacagctgggagaagggggattggaatccaggcagcctgactcctctggtacctctttctaaggagggacgatgaggaggaagaggtgctggaaaaacattttctaattccaggagacggtagtcacgtacagcaagttaggggtgaatgtcatttccttaataagcaagaacaagaaagtgggtatctctgtttttctctctactgctgaaggcaataaaaatggaaagaaaaaaagagaaaagcctctactgacagctttgaaagagaaatatttttttcttcttttttaatcagacaggtttgtagtggccttccccatccctgctggcccaagacgctgtagcagccatcaaggagggggtcttacaaacgagagcccctttccctccccagccacctccccacccccaagtgcttcctccctcaggacaaaaataggcgcccatacaataaatggggccagaagttctccaatccgtggtttcctgtctgagacctccaggtagcaggtccactgggaaggggcagcgtgctctgtgaggcgagcctatttttattttttgttatttgtgagtcttttttttttttttttaaagaactgattattctggaggtgaagacttttgttggtgacaactgggaaagttcctcgggaagaggccactgtctgcgtctagatggggtttccacgcgggcctcctcctgctcactccatgcggagcagaaggcagggagctgggactgtgggcagcgagtactttcagggctgtgtggggcaggcttcaaggggcctgggcaagtctgcccaccctataggaacacctcaatgatccaggccacggctaggattttagggattggcaaactggtccacagaccaagtccagctctccagcctgtttttgcaaataaagttttatcaaaacgcagccacacccattcacttgcttcctgtctgtgactgcatttgtgccacagccacttgctgtgtggaccctatcgccggcaaagcctaaaatattgactatctggctttttacagaaaaagtttgccaaacactgatctagaatataaacagaacaaaaaaggaaacctctgagagttaaaacaggtggcagaaatcctaaagctcactcactagtcatccaagagcccttctgctttgcacacagaacattgtgtaattcacccaaaataattttcttccagcttccatttcttctgctgtaaagttgggggtcatatacctgttcaacttacgttgcaaagctgtgctaagagtcaaaatacaataaaccagttcatataatgacagggatttttgaacttaaaaaacactctgcagatgtgatgtggcctcatgaagtggtagtcacatctggaagcaggcagagaactggcaagcttggcagataagaactgcgcttggagatggtccaacagcttccttctgtgggtttcttggcgggtgggagatggagggcagggactgttggctttccccagctcctcctgagactgagacctaaagggtgactgtcttcctgcccttgaccttagacagaaaagactgttgggggagtcttctgctcacccatttctctttcctcttatgtccttccctctttcttgctcaaatcttccccctctttcatggccctgttccaatttcacctcctgcatgaaactattctggataaatcagaccacatcagcccacagaggtttcttggttttttgggggtcttgattctaggccaattttgaggttttccccttttttatgcccctccatgcatttgtgcctcctggaggaggtagacctggaactgggccttggggggtggcctgggaggggagagggacctatggggagaaagagaattatggtcaggagaaaaggaggctgttgagagtgggggagtccaggagtcctcgagaggggagactgtatgtagggagagcagttgggggtggccctggacgtcttgggacctgaccaaatagggactcagccgaatgctctccagcaaggaaatgcaggatggaaggaggattcagaagccgtgggacagggcctgactgagcctatgccctcctcctggagaccaagagggagttcccaggatctccctccaggcaccagggaagaagttttgttatttgttagggacaaaggctagagccctttaaaagtaggacttggccccagtggagaggtcatctgtccatgccctactttgggccagaccatatccagaatcccttgatgagtatcagagggcttaatccttcagggagtagggccttgaggccagcatgggacagggagctgggacagtaggctcaaagaaggccagattgaggacagccttcctcaaggtctcagctgggccaaggccatcacacagacaaagagctgctggcctagccctgctggaggaatgagctcagggttgagaagaggccagcaggggtgcccggtacacagtgagcaggccccaggctggcctgagtggccctgtcgacggatgcccagaggcagacccaccctgcacacgtccacccgctttgatgaatggggccacacagcccgcagccttgccgtccctgtccttcagcagtttccagggtctggtttaatcctcccactccctgagccaatttggcgatgcccttgatgacttgggccaggcctggttgattgagattgcttgccggtccagcatcttccctcctctgtcctttgtggaaggagccgccggggcttgggggaagaggaaggtgtcgccaagggtgtgaagcatccattattcctttattagccaatgtcccatttctggtctcattctccttcctggcagcggtgagtttaggggcggagaagcccagttattttagtttccccctgcttctgtcactgggagcagtggtggtggagggggcggggacggacagggctacgtgctctccagcaggcatttgtgaatgggcctcggctcccaggctgacccgccggcaggcggcccccccaggacacactgactcttactggctggaaggcgtttttccagcattgcagcggccaggcaggaggaagctttcctctggcccaagaacaataccagggtcagcccagggacctccctcctacaccctcttccttccattgtgagctgctgcacaatcccaggcccctctgttctatacagccaggggggctggggggtcaggcccaggagagattcacagtgtgtgtgacaccgtcagttgcttgcctccacttcccaggctgggccagggatctggaggcagccgatggccaaacaaaccaagtgagtgagtggccattgggtccctgtcctttgcaaggggctacctccagagtggggcccccagctggatgctaccactctttccctcctttccccattgactcgtagcctgccagggctggaaaagacccagaacttccacctacaaccccattacagacgaggaaactgagagacccagaaaggcaaacttctcattgccttgcttaaaaatccttcactgattctcagggcctatggaaaaccctggactttcctttagcccagggcctgctggcacccccggcttctttcctgtgactccgagtctgtctgtgctctcagcttggtgactgattgccaagcccctgatccagcagcaccagttgccttcagtgtccttcccacctcatccacctgcctgcctgccccacacctggtttttgtttgtttgtttgtttgtttgttttttgagatggtgtttcactcttgtcacccaggctggagtacaatggctcgatcttggctcactgtaacctccgcctcccaggttcaagcaattctcctacctcagcctcccaagtagctaggattacaggcgcgtgccaccacacccggctaatttttatgtctttagtagagatgaggtttcaccatgttggccaggctggtcttgaactcctgagctcaggtgatccacctgcctcggcctcccaaagtgctgggattacaggtgtgagccaccgtgcccagccccacacctgttcttcaaagactctgcttagaggtcacctcctctgtgaagccctccctgataagggacttttccaatgcgttagtttattgattcacctggctcctccagcacttaatatattcctagagcacagctgcccctccacatcactggtacacatgcatgcctcacccacacatgcatctctccctgaaacacacatgatcccgggagccaaaagcgtatcttattcacctctgcagctctttgcacaggtcctcaaagtgtggcccctgatcagcagcagtaatatcacctggggacttgctagaactgcaaagtcttgtgttctatcttcaccccagtgaaccagaaactctgggagaggggcccagtggtctgcattttaacaagccctctgtgatactgatgcgtgcaacagttggagaaccactgccttacgacctacttgcaggccactggcttttcactacttctggatagttcagggagtcactgacatcaccttcccctatccccttctatctgctgctgagatttttggttggttggtttttaccattattttgctcaaatgaaggacaaagaattgtgccctgtttgacaacccaggacatggatttgcaaatggtttggtgattcaaggacaacatggtcccccagactccagcaactgctcctgtcactggtcatgcctcagaggacccctgggtcccgacagccctgggcgggccattggggattagggtttctggaaggctcattccctttgcaccaaagatagaaacctcagcagagtcctcagtgacgctgcgtatttccaggtggtcaaagccaacacctggggtggagatgtgggggcaacccacctggatggggcgaagccctgggctcagtgttccagatctttccttccagcgcactgctttgtgtgtgtggcagatgaaccatccacagcgtgctgggcagaggccgacagggagaggagtttgttccctgcgtgcagaacctctgcagcggcgggcgctgacaccgaagcacactgggtggcaggaggaagcctccctgggaataaagcaacaaacacaaacttctgtctgcaaagagaataatccaaagttgatgttacatcgaccataagtaagaacaacaagggagtagcaggcctagctaaacacgccctggaaaggctacatactgtggttgtgtccagaaaacaattttggactccaggaaccccacagaaaagacgggcctgtcccttggacccctgcttgcagtgagaccactgtccctccgagcatcactggtctcacttccagcagggggcacaagggacaggccatcatttcctgcccccgagcctcaccctcctcctgtgaaataggagtgctggccttgccctccttctggatccaagccttcaccccccttgcccacttttggggtgctcctggaggaaagagctctgattattaaagcattagatgtagtcttgtgttctccaaagaccctctttgttccttttggcaccccacccccaaagggttcaggaggaagctctgcctctagcggtctaggccctgctctctctccagagtgaaaacctcaaggagtgttttcattactcctggggactttggtgttgcttttcgctgtgggtttcctggagtgtgtctcttttggatcccagaggtctgccagcctggccgggatccagggagggtaaatggtggctccttgtctgctgagacaagcgtggcaccactgtggccaccagccctgaaaatttggggcccaggctcccaagctctcatgggggcccagttgcaccatgaggcccagggctgctggccactagttctatgttgagtggccaacatggcctgggctggggttcccctacctgtgaggtgctaaagtgtcaggtgggatggacactgctgtggcgtggtgacattgctaaggtgactattggagcaaatgacctcagtagccacttgcacctcgcatgctttgtggctctgattagatcattcatctccaacgtagtataatgtggggccacaggtgcaggtgggattcagaaaagggaaaatgtaggctggggcgacctcatgccttcatggggaggtgggccccaaacacttgaaccatctactcattttttatcaaaatagtacctgtctgtaacttacaaaaattaaatgatactgaaaggcctgtgacagaaaatagcagctttctaccccctgcgtcctcaagtgacccgttccattcctcaaagcaactacataccttcactgtttttactatttttttctagtggtaccaccctatttcgaatacagatatctaatctctaatatttctaatatctagtatactattattatactgttctttttaagtatatcaattctagtgatttcctgctgattttcttattatgagagagaagaattttgttctcctatactctgtcctctcaatataggtataccgaattttacttaaatgtttaatcagatgattacttcattaacgaatcctgctttccttttctttattttgcaaaaattcagattcacaggaaagttgcaaaaataacacaaagaattcctatatagccttcacccagattccccaagtgttcactttttaccatactcgctttatcattctccctatgtaattttattattttcttaattccttgaagagtaagttgcagacacagtgccactttacacctagatacttcagcatgttttcctaaaagcatggacattcttttccataaatgcaatctaattgtcatatcaggaaattagcattgacagaatactgttacataacctgtagacatttacattttgttaattgtcccactaatgttcttgatagctaaagaaaaagtttttgtttttttgtttgtttgtatttttttttttttttttggtttagaacctatacaagatcagactttgcttttagttgtcatatctctttatctcctcaatctttctttgtcttttatgaccttgacattttgaatagtacaagcaggccagttattgtgtagaatgtctgtcaatttgattttgtttgatgtttcttcataattgagtttgtgtactttttttttttcttgagatggagttttgctcttgtcacccaggctggagtgcaatggtgcgacctcggctcactgcaacctccgcctcccgggttcaagtgattctcatgcctcagcctcctgagtagctgggattacaggcacatgccaccacgcccggctaatttttctatttttggtagagacggggtttcaccatgttagccaggctggtcttgaattcctgacatcagatgatccgcctgcctcgacctcccaaagtgctggcattacaggcatgagccaccactctcggctgagtatgtgcactttttaagggaataccacagaaatggcgctgtgtccctcttcgtgcagctcatggagaggcacagggatttcgtgatgttgacattgaccaactggttaagatagtagcttccaggcctcactgctatgaagttactatttttctttttttaatttttttgagacagagtcatgctctgttgcccaggctgaagtggagtggtgcgatctcaagtcactgcaacctctgcctcctgggttcaagtgattctcctgcctcagcctcccaagtagctgggattacaggtgcctgccaccacgcctggctaatttttgtatttttagtagagatggggtttcactgtgttggccgggctgatctcaagctcctgacctcaggtgatacacccacctcggcctcccaaagtgctagaattacaggcatgagccactgtgccccggccccaagttactatttttctctttgtaattaataagtatcttgcaaggagatagttgagactatgtaaatatactgtttctgctaatactttcactcacaaattttagcattccttaatgattcgtgcctgaaatgtcatcatgctgatcagcaaatagtggttttaaaaaattccatctacatttattagttggctttctgctataaagatctttccttctctatttttcttttatctgtttatttatatatgttttggctcatagatttttattttattctaagggttataatccattactattatttattttgatgctcaaatcatcccagtgggagcccttgcaaactggcttctgtgtgtttctaaaatgtccccattattctttgagcacttcttgactttcaggcatgagaacttgttctgggcttatctggtattttctctgccccagccctggaatctagtgttatctaaggagccctggtaccttttaatgaatggttcttagaagccaagatcgggacctaggtgtgctcattgctgctcggttctcacgtttttttactctctcctccctcattccttgagtgcctgggttctcaggtcacagcttctgttattctgcttctccagaaataaactttgaatcttttgcctggtggtggggaccaaagtgtagtttcctggctatgtggaaagggaaggggacttggggagtctcatatttagacttcgatctggttctgctgtttcctgccaacacctgagccttgcctctcctggtacctggggcctgcaagctttgagtcctcggagatttgcagcctccatccatgcatttctcatcagtattcctctctgcacataacttaggttgcacctgtccccacactgccaagttgcccactcctccttcgtttactttctgtctttgcaaagtttgttgaaatctcttttcttgatctctgtgcttatgggggtttacaagtttttgtattcatgagagagcaggagttgaattaaatgcatgtggtcaatcctgtcgagtcagaagtctaatttgtttggatttaaatagttagggaaacaggaagaaggtcggaagactgagctctgtgtgcttgtcaagaggagcaacgggagcagatggtgtcgtgtgggagtcggggataaagcgatctgtcttcagagttcaggcaggagaactggcttgtggctgagccctggacaggttgtatagagaggataaagggggtgcaggatgtacctgaatgccagtacatagatttttttctttgctgttgttcaaagaactctaggaggggacacacacacacacacacacacacacacacacacacacacacacaccaagcttaccaaccaggagatgggcagagtgagcagagtataagccccagtcgtctgaggggcctgggaaaatctctgcttggattcagaccttacaaagattcagaccctacacaagagccaccagggcaaaagtgctctgggactcaaggataaggctctattgtcctcccctgcttaggattccagccacaccctgcctagctttgtatttgccccttcctggtgggaaagactcttcctcagcaagcctccagagccctgggagcagggctcttgtccgacaccacctctgagacagcactggtacgctgttggagctccatcaatcacagaaccagagaatcgttgctgaaattgccagagcaaatgtgaagccgactgtgtgcaaaggtgagcctgaaagcagcctcttcaaattgcccttaagaacttgtaaggcaccaggtagttgctggcacctctgtctctgcagccgcctgagtcccgctgtcctttgccgttactaagaaatgtggcccccacccccagtggtagcccagtcccagaaggtctcatataaagtacaagctgtccttgccttttgccaattcacatttcaacaatccacgcattctgcagttcctgaaaaccgcttgtgtagaacttctggtagctttaatctccttacttgggagttcctgctcatttctggaaatgtttaaataagcaagtctacccttaaggaaagtcaagacagcttttccagtataatacattgcatcttagtgataaagaggtagaaacctcagagcttagtctggttgaggcaaggccagtctgtgcacggttttgtcagctgctcctcctctcaagaacactaaggcctgaagggcaagggctctgggtgcatccttattacctggaagtgctccttttccagcagatcacctgcaaggattcctcctaccgacatgttgtcacctcagcccctgatgtggaggataaagctgggtatacttgcgatggggctggtgaagaagagagggtcagatgagggcaggctcaggtataggggtgccaaggatgggtacctagaccagccagagagaacacagaagacttagctgtctcaccatggtgcccagagtaaggaacagccagcattggatggaggaacaaagagatgaaatgtcctctgtgcatgtatcttgaaaagcacctagtcaccattctaaaccatcctaaacacgtccttctaaacaaggaaggcaaggctcccagtggggaagtgctgggccagaggccacacagctcactcagccactgacttggggcccagggtcccttggtcgctggtcttcccacacatcctgtagtttcttttataatgaatccgaatgattggtccttgtacaaggctcacaggacatctgtttaataatgtattctagaatttcctagagatcagcatcaagtaggtgtctttgaaaaggcttcatcactaaagcatctgcacagaaaatgttctgtagagaggaaagagggggagaaaaagaaaggaatgacaatcagagctgcctctctgtctctgcacacactcccctctctcatccaagtgagaactgcaagaccacataagctgctaatggccgaggttcccggggccccactcctcagccccgccatgccggggcacagagaggtgggggcacagagaggtgagggctcttccgaaagatgcggtggtgtttgggggccttcagacacaccctggaggaggaggactgccacagcatctgggcatcccgcactggcagttgtaccctgtcctcattgttctctgttctgcatactgggctgtgtgtcaggcctgtggcttcctttttcatccctgaaggaggccactagccacatggcgactttttgcaaattagaaagaggtgccccttcctcagcacagcctctgtctgatattgtcataaaaataactcaaatctatgaggacagagtggccgagtcacctcctggggttgttcaaagcatgcagaagcagcagcccgctctcattttaagtggatttcacatgctgcagcttgaattgaaggcttgggtcactaagtcattttctagaaggccaaactttgagttgagaacctttcagctacagagaaccctccgctgaagggtaatgtctaacagccaagaaggcaagtttcctccattctatttcttcaggaggatggagtcacgaggtcataggagggcccacctgaaaggagccttcatggttgtccatataacacagcccctttcagtctgcactgagccaaactcaagccccaggccagcgcagatgagctgaattctcaaggttgttgtgagtcagaggtcactgtacacaggagagagattcctgctgtccaggaggggctaagtgcaaaggtgactttcagggaagaaaaggtcactaccttcccctgccgcagttaactctctgggcaatgggtcctgggcatgaggcacttgtaaagctccccgagtgaatctggcttgcagtcatggctgagcccctctgccctaaggtattaaagacttatcccatttccccagtctgtgagatacttacatcatagaaaaataagcagttagccaggacttgatcctaacttataaaacattagttcagtagcttctgtcatcttgaaattgatcatgcccagccttattttctccctgtcctataagaaggtaggattcctcagagcagggctcatgtcttctttgccattgtgtttcttataggtgacactctctcccccatctccaccccaccccgtccttcaccaaaactcatcaatttcattctaaattttattttatttgggcgtttacagactctccttccatccactatggcttccctaactcctccgctagtcctccttgccccttggctgttgtgacagccccttaccagtctgccctgggtttggtttaaatcccctaaatccagtcacctctagcatgacctacaaagtgcacacatctagctagtttcctgatttgctccagcctgtccttgccttccatcacgtggaagacaagctcctctcatgcacggtcatcccaatccagcccctgcatttccttccaaccctgcatcccacattttccctatcttgcaccccatgtaacagcacactggactagctgtggagccctgagtacagaagggccaggtctgtcttctcctggctgatccatcatgacctggctcggggattggctgtggaaagtagtccacaaacacttaaggaacactctctcagcagccctggcgcaccctgcaacacgcacaggacccagaaggcatcctcccagagccggaacacaggagcctgccccgctccacctcttccaagctgcatggacttgaccaagcacctttacttccccatttcctcctatctaggatggagataataaaacctcctccctgcaaaccaccatctcagaaggctgtagtgagaatcaagcaagacaataatggagaaacttctttgaaaacagtgaggtgccagtcaaatctaagggcttctgagagggcagcagtaaataggtattgcacacggcagctcctggggcccactgggagccactcaccacgagcatggtgcacgtgcctgtgagcagggcagacagagtggctgcaacacaggcttcttccttcggtatttttataaagggaatcgggtgaaggaaatgtcttggaatagacaatcttcctaaactcccccaaaataacttcagtggaaacaattgtaacgtccactctgccggcattgtttcagtccactgtagtatgggaaaagtctcccggcatttccaactcaactgggaatccacttgacttccagacgtctagaaacaaagggattgtgcccaagggccactctgggtgttcgtggccctctggtgccgaagacaattccagggcctgtgtatagcttactcttcctctctccctccctttgggagacatatttgctgaagggctttgtattttcccatacataactttgtaggggtcgttaccaaaatagtttgttagaatacacttgagattctagatttccctccagtcagtcacacagcccagtgttccagattcgaggcctcccaatgctcagtgactctttgccacctgcaccagatagaatcagtcctctcctaaaaggtctttccttcttcctttctctagctgggaacaggtgctcatgtccccagtccttgtctggtcttcctgtctccccactccttctcttgtgagtctgtcctcctcaaagaaattgtccaagcatctttgctcactcctgtctcccctttccctctccctcccagacccaagtggtgacaccagctctcccctggcctgagacagatctgaagccctggaatgtttcttcactccctcatctattcttatcctccaccgcccctcacttgctgccccaggtattccaggacaatcctatttacctgccattttatccttttcttctttttgagacagagtctcactctgtcacccaggctagagcacagtggtgtgatttcggctcacggcaacgtctgtctcccgggttcaagcaattcttgtgcttcagcctcccgagtagctggattacaggcgtgtgccaccatgcccagctaatttgtatatcttttagtagagatggggttttgccatgttggccaggttggtctcaaactcctgacctcagattttatccttttcaaaaacctgagcttgttaattgtctcactaaatgagacttaagtttttatctttgtaaaacaaaacaaaaaacccttgctcaactcaactgggaatccacttgacttctggaggtctggaaacaaagggattgtgcccaagggccactctgggtgttcatgggccacaaaaaaacaaaaacaaaaacaaaacaaaaaacaaaaaacaaaaaaaaaaaaccacccttactcctatttctggctcaccatacacgaagatcagtttccttcttgcctggatcttgtcctctccacctctctgcctctaattctcccatccatcaaaatctctctcacttccccctctttgtaagaagtgtttcctaaccattctgctgggacattctagaatctttgctttctcagaacatggtaccctgcctcattacttctcaaactttagcgtgcatatgaatagcatgcagatctggtgaacatgcagcttctgattcaggaggactagggtaggcctgaacttctgcatctccagccagctcccaggtgagaccaacgcggctggtcctcagaccacactttgagtagcggaaccctacaacaatggttcccacattttgctgcacaatgggctcctgtggaggggtgggttgaaagagactggtgctagtcttccatccctagacactctgatgtttttagcatggagcttgacccaggcattgggattttaaaatctcctcaggtcattatactgtgcagtgtgggaaccactgccttattgcataaagtgaatatggctaagcctattattatttcatctgtgcttaccttgtctcgaccttgatagactacagccctctctaaggcaggacttggtcaacattttgttttgagcattgatagatgaaccaactgattagatattaggcccttacgtgcttttctgatgatgaatcggtgttaatgagcatatatgtgttgccacagagaaatgtactagatatcaagagggaaataaaaatggatcttggcagaccatggtgaaatctacccggtgccagcatcagcggagggtggcccaggctgtcctgtgtggcaggctccaagggctctgggcatgtttttggccctttcccacccacaagaggaaaaagaaattctacctctctggcctgcttgttctaaaaatactcactttttctccttttagtctgaggcagtggttctcgaccacgttgtagactcgcctggggagcttttaacatctttgatgcccaggctgcacccagaccaaatgcatgagagtctctggagtgggacctgggcatcgagatgttttaaatgtccccaggggctgtcactgagcaaccagggctgagagccaccaacctcaggtaaatgtaacccctttatcctcatctcaggtggactgaatttgtcaggtccttctatgaaggagtggggagagagtgtgagaaggctgggtacctatccaaggcagaaaaccagcacccagtagagagaagggcccagagagggaagacactgctgccaaatgcgccaggtctccaacatgtctccagtgcaagggtctatcggccatgatccacgcgccaagtccagccctccattggtttttataaataaagctttattggaacacagccacacttctgtagctgtttttgccatacagctgcagagctgagtcattgtgacaaagaccttatggcctgcaaagcctaaaatatttagtatttgactctttacaggaaatctgctgatccctgctctagagggttgaccctgcatagactccctaactgcagtttatgcgttggtgcctatgcggggaatttttaaaaccacattttggactttgtgtaaatttttagttgctcttaaaacagagcagtgtcctggtggctgtgctgacaataagtcctggttggcttccctcactcagctgttggggtggcaggtgctgctgctcccaccctctggtcccaaagactctctttggttgccctagggtgcccggcagatgttactgttttctctgcaggctgtgagtcgggggcttgggaagccccatatcaaaacctagtagatgtaagaagttagacactctggctaggaatggacgctattcctgcccaaggacaatggattcaggtgaggagggctgcaggaggcagaggctctggagacagagagcagggaggggatgagagctgccctcagtcagagccacaggaaccctggcagtggaggatggccaggaagcgcctaaagactgagcttcaatatcctgagtccaggttctcaaattctccgccattccttcttgagccaccgctgtgcccctgaaagtaggtcagatcactgtctgctacagagccatggtgggaatgagataccaactacgtcagcagggccactattgcttagtgagcctgctggccagaaccaatggctgcccaatttaagacaacccataaagacctttttatgtggtgcagactctttaatgccgtgcatccacacaacaaaagcttagcactgctttctgggaatggaacaagtaattgaatttctgaaatgataaatttcactatagtcagagagaatggtacaaccagtctccttaaagcatctggattctcttgtaaaattaacaagttggagtcgattgtctaatttactaaagatatttggaacaggacttacaatttcctagtatgcttaaaatacagttccacacagagatttttctgcatgcaagcagctttttaggaactcatctttgtccatctaatctttcttcctaattggaaacctctgtaagaccttatcctttgtcatttctgcaagttcctcatgctttttaaatttttgaccacacacttgtcagggagatctattatcttcttctggtactgatcagattcacatgaagcagcacagctattttggaagcacagcacagaatttggaagaagggagagggaagaagtgaggtgctctggcacaacccagttacagcaaccttgtaaatgtatgcattcagtgctggaattgtttacagagcgagtgcccaccacaattggggctaaccctttctgtagcttgtttaaagccacattcattattcattcattcatttgttcactccatcaatcagcatttgttgagtacctgctatgtgacattgctgtgcagagtcattataatgggatctgggggtctattgccagagaaagggaacccacgcacacacttctggatgggcactcgctgccgtcagtgctgggtctcatgactgatgctcttatgagcattccgctacggttcaatcctgagcctcatgggaataggctttgatgttagagaactgaggtgccaccctagttccattgcttacttgctgcatttctttagacatgctgtttagtctatccagccctccttttcctcatttgtagagaatagataatcgtagtacctatatctcagggctattgtgaggtttaaattagttactgtatcagaaacttttcactcagtgcctgcctccatacattacagcccgttgctatcattatgatagctcataatccatgtagacatcatttggctccttctatggcgaggagactttctgaacaccttccaggaaactggcattgctcagtcaggagaagagcgcgtatttatcgggcaggactggaggggaaggaaagagttcgcagggaacttcctgccattgttgggctgtctcctccgcatgtgactcggctcaaagatgcccaagcctggtcttgctgtctcctttttctttatgttcttgccactctgaggtatcctaggaggagctagtagaaccttttgaaaacagccaaggagtgtcacagatctggcaggtttcgtgcaaaggcccaagccgcctcccacagatattccccctctccacttcttccccagctgtcagtctcattagcatctgcaacgtgtaagatgcaattctggaggtgaagcttagggctctggcatggggcggggggcttaggagtccctggagtcccctagtctttgcctaggctatgggcccagctgtgatccagagtttactttcacctccagccctttcacatcagtagacagcacaaatctagggcagcgagcctgtgtcttctataacccagtagaggccattggatgggacccccctgttggtgctgactggggtcacagtttgggctggcctacctccttggaccctgctgcccatccatcgcagggtggaactcctggtctcaccgtcccggcctgtgttactttgtgtgacccccgccagacatattgctctctttatgggtaccgacaccgctcttagtctgtctggcttgagctctcgggacctagggtccacttggacccttctctttgcaagctgatctggcttgagcatttcccatttgggttcagcaaacatgtaatccagaactggccaggtgtgtttctatctgtcatctcctttggttttcagcatctcatttaattcctacaacgaaaggtaggtattagtctctccattttcaggcagaggaaactgaagcttagagaggataaatgagcagcatgggtgcctggccaatgtacctgctgccttgctgtctcagaagtgagacacttgttacacacagggggcctgtggagctaagtagtgggcctaagcatctgtggtgtgttgtcaccatgcagccagtgaatggccacctttgtcctcggagagcttacagtttcactgagtcctgggggacccaggtctttgttaccttttccctttaactgaaggagagctagcaatcactaagcactgagccttatggttagaggacatcaaggatcctggcctcttgcagagcaagagatattgcctagttaaaggccacagacccctgggcctctgggccaccaatgaatgctcttggtccacagtggatccagtaagaatggcccaactctggcctgtcaggacagtggtcatcttaactttttatacaacaaacaattatggaggctcatggtatctaaggcactgtgccagacactgtggggcctacagaagtgaaggaagcatggctcctgagctcctgaaagtttgtagcttgtttggggaggcaagcatttaagtaactatctagaccattcagacagcaggatggagtactaggaagtttgtccagtgtgctgtgtgaccagatggattccttctcatgggaactgggatcagctttgcatggcaggggcatttgtgctaatggtaaaagctgacagaattttaggggtaaacagaagtgggaagatgttccaggctgaagacaaagcctggaaggaggagtgtgtgttcagggatggcatggcaggtgcacagggaaagggaggcccagatggtccttaaagatcagtggctgaccattctccagtctaactccaaatgccagggcaggaacccgggtatcctggcccccagcccagtgctccttctgctgcattgctgtaaatagaagtttaaagtggttctcaaggccagaggggattggggagcaatccatttgctgaagcttttcctctggatgggcttctcctgagagatgacatgtgagggggtagtgagaatctaagggatcacctcctcctgataagccagaaagcacctccactgttgggaggctgtgatgcagccagaaatagtgatcctgccgttgcatcctagcccttgagtccatcaccccagccctgcagtcctgcagtcctgaagcacaggatctgatcccctgagcctggctcatgcactctggccttccaggtcaagcgtggggtatgaccagagccaggaaccatgtggcactgcagggcaactctctactcctccctcctgaaagtcaactcagtggaaaatgtagccatcattaaaaaaaaaaaaaaaaaaaaaaaaaaaaaaaaaaaaggcaaactcccctctgaaaaccctatggatgaagggagcacttgaagggaacaccaagtacacaaggagaaaatgacaaaatgctgctttcctggcctctgctgctgggcagctgggtgattcagctgcaggggctgccctcctggaacctgtcgcaggagatgccccggctgcatgccaagctaggagggcccagcagctggcatgggactcgcttccatcctggggaggcaactatgtatttatcttattttcagagactgagtctccttgtgttgccccggctggtctcgaactcctgggttccagtgattctcctacctcggcctcccaaagtgctgggattacaggcatgagccactgtgtacagcccaattctccatttttaaatttactggtttatgaaatttgaaatgttgggcaccactaatttaggtctacgactttatttaaagaaactctaagcttcacatattaaagactaaacagaataggaataccctatttgttttctctcagccttgaatctttcccgatcttttcaacctggtcattctggtctggctcacctgtccctttcttagggaggactcttctgatgccctaatctaaagcattatccccttcctatggtttggtttggttttgagcacacttgtttctgtttgaatgaccttggtgtttttagctgcaggctggggactgtcatttccccttggtagagtggaagttcctctctgtggcctaggtcactgtggcatccccagcacctagtacagccgctggcaccacataagcctcagcagaaatgtgttgcctgaatgaatgaaaccacggattggcttcctggacgaggacccacgtttcaaccctctgtccctccagcaccaaggctgagctgcccctgctggttctcggtcagacctgaggagagaggtcctctcttccccactcttcttatctgtgctgtggctagcttcttagatacccccgagcctcctggtgcccgacggccccagcaggctagtcagacccagtgtctcagtcgagtttcttggctgccgaggcctgaaatcttcagggcctttgagtaacattctgcccttgagcaggttcacagactggctggtcctctgggagacaggcccctccctggctcttcagagcctccttgcagcttcccctcttctagctctctgccttgcccagagtcctgtgatgagatgaggggagggattgggaagtgccagcatggggctggggctggggctggggctggggctggggctggggctggggctggagccgggtggtgcaggtctgtgtggaggaagctgaggttgcagggactgctttggcccaagagtgtcctggacacggcctgggagcttagcaggtggttagttgattaacacaggtatgaccacattctaggatggttttggggtttgggcggctgcttcccagcaggtgcacaaagaccacagacgcaagtgcttacgaagcctcaggttggaggccttcctagcccaggggtctccacatgcagcggggcattcttgagctgggctgtcgacatgccattcatgcccagtcatctcatttaaccctcgtaacggtcctctgatatgcgtatgcttctttattaccaccattttttaggtgagaaaactagaagcttaaataaggtaggcattgctgccagctcctgcggtaagtggcagtgacagcatctagccaaaacgtttgatgcctgatctctgctcagggcacctggatctgcattgctgcagtcccccagctctccaattccacgtgagcacactccacactggctcggcagatactgagaggcaggtcctgctgctctcgccttcactgtggcctccttatccatgctgatatggcttggctgtgtccccacccagatttcactttgaattataataattgccacgtgtcaagggctgggccaggtggggataattgaagggagatggtttcctccatgctgttctcatggtagtgagtaagtttcatgagatgtgatggttttataaaggggagttcccctgtacatgctctctttctgctaccatgtaagatgtgactttgttcgtcctttgccttctgccataattgtgaggcctccccagccatgtggaactgtgagtccattaaacctctttcctttataaattacccagtctcaagtatgtccctattagcagtgtgagaacaggctaatacacatgcctgtggcctctccagccagctgtgacctaccagggcagacagcaggacagtgatgaacctgttcattcatgtgaggccttggaggcttccccccggcacagcggggtacacctcagaatcttagcatggctgcgcaggtggtttaggcaggggctccctccctgctacccacagatgcccctgccctgtgcgaacgtgactactgctagtttgtataatgagctgcagcagagtgtgctcagaagaagcagagcagagcccctcaagcgtgggccgtgcctctctcactctaacctcagagcctctgttcacttcgaagggtgacctcaggcatcccttcctccacagctccttggaccttggatgttcttccattgtgactccactcaatttgcgtgtccctcttccccagggcccatgcccctcttggagacagaggtggagtcttgttttcctgtgtctgtgcacacagcatgctcacagggcaccgtgggcatcctctgagggtttgttgagcatcactcctcttctagagttggttgatgcttcagttctatgatggtctttgaacctcctcaagtacataaaactcttcacaatgttgcccacttctcaacagttgtcatttcccccttagaggccagaacgcaaacattgctttgccttctcttgagcttgctctctagagttcttgaggctctgggtcttatctgtgccatagacacaccacttcatgaggggccaggacacaggccatatgtgtctcatcatgcccaggtggttttttcaggggctgcagaatggaaactctcattcctcatggccctttgtacctctcacatttcttgggcgtctttctgcccctggtctgcagcagcttgaaggcattgccattttcagttcagaagtgtgtccaggacccttaatagatatccattatccagggaatggagcatgtcagtccactccagttccattctcttgtgcgtgtcccgtgtcaatgagcagcatgaacaccatgagcctaagtggcctgtgttcaagtctttcctgggttcatgacctggagaaggcccgtagccttttggtcccatttggtcttcgacacagagagtcacagtcatcctccagtgcctccgtcccccagccacactgggggccccccagcccccagtgcacacagtgcactcccttcagtgcactgtgctggctgcagaatggaagcctgacaatggtagttgaagaagtggcattttactaattgtttcctgtacattttaccctctataatgtagaaacaatcttctaacacttccctgttggtccctagtccctgttctttgcatcagtgtcctcacctattttatctgtttattcagaaattaataagtaaatgtcatttgtatttgacattgcctggtagattcctcctgacatggctacccgtggagggcaataagggaggggccatgtctgctttccatgacttcctggatataataagatcagccccactgactcctaaagttgtatcatgttaaattatttaggacttttttggttgcaagcgacagaaacccaactcaaagtattttaaacgtaaaaagaatttgttggctcatgaaatcaaagaaagtcttaatagtgtggcaaaggaggtaggaagagcaaatattttcatcctcattttacacaagagagaggagagggcagaatgggatattaaaagaatggtccatggtgatccaggcttagcgacagctaggatccgggtcacccaaagggtgtgtgcagtttattattcaggactctttagactgttacaataagaaaccctgttggaaggaaaagggagagaggggtggttattcccttggagcatccaaggaagtcttgcccattccagcgacccagcctctggaaccgcagtgctgtgcagatgaaaaccatctggatatagggtgcatgtcataggctctcacccacaaggctaccctgcgcaaaatattcacgtgcacttttaagggggtcgtggaatccactgaaacctgtccggggttcctgagtgaagcccttcttctagaaaaatgtctagctcattgtgtagctagcctctgggatagtattgagagcagagcttttcagaatgggtagagttttaggttcacgccacagggcaccaatgtgtggcaggtggaggcaggatgtgtggggtgccagggctcagcggcagcttccagaaattccatgtttacttttattgtctatgattttatattagaacttcagctaaggtattgtttttaaaaggatctctgctgattaaaaaataataaattaaaagttagaaaaccacaaatttaagcatgggtgagcctgcccacccccgactttcctttctgaatcaggtcaacttctctgaatagctgtgcagcctagagattccaggaattttagaaacattacctatttatttctgcttggacgtgacccacacatcctgcccacgtggagagagaccttggtaggataacttcttagaaaaaaaaaaacatgaaaaaccatgacccccagcaggaggaagcctctgctgttaagacaagcttattgtcagaggagctgtgcttgggatttttatggtcctttaatcaagtgctgtggttcctttgtattgttcaccccttgggatgtctacccaggttggggctagagatgatgggagtctgcaagtcctgagctagcagggtctggacttggcctgaggatctgccctacctccatggggctcatgctctctgggtatgcccagggagtgacagaaacctgatgtaatcaatatagaagcttgtgaagaagagggggactgtagcttccaagaggccagggcagagtggatatccaggcactgtgggggcagacaggtgatcagctgggagggagcagggttggagctgcaaggtgtgcctggtgaggagcccggtgtggccacctcctgcctgggacctcccaccccttccctggcctgggctaggatccccaccactgcacggctgcaccacttccttgcaaagacaagcatttagtgtagttgtttttaacaaagcaggaggaagactttcttgtgtctgtataatgctttcttccttttcaaaaagctgctgtatgggagagagagagataatagacctagagatagttaggcttggatgatttctatcagacctaggttcgtggtcaggggtcagaggtcaaagatcatgagactgtcaggaagattttccttgaaggttaagtgggcattggattctatgaaagtgcaggccatggaattgagctctgcggggcacttcaaaacctcattggggcaggggcagcagcccggggactccccctccaccaccaccaccaccactccagcctgtggagtgaagggcagggtgggcttggtggccaggaatacccctttctggagaggagaagggaggcgagcaggtgagcctgccaaaagggctgtggccagggtcatctctggggttacagcaaggatatgccaggcagacacaggaggctgtctgaaccagtgcctgccagacgccagctctcccacttctgggcctggggggaagcgtagtggtcactgggagggactgcctgtctctgagtacagaaatgagggagggacttgctcttgtccactccctcttgcttctagaggcctggggagcatggcggagcaccacggggtctatggtagggtgggagagagctctctgatgctcctggggggttggcctcccatctctgccctggtaccgtaggccatgtcacatcaccattgggaccatgtgcctcagagatggaagacacaggcttcctgctaactggttgggcctctgtgggcaacttctttgacctcactaagccttctcttcctcttccataaaaatgggctggatatacagtggaattacctggtgagcattcaacatatacaaattcaaatctcaaattcaaattcaaaatttggcaaaggaaatatactcagaaaaatatccctcccagcctgggtgattttgcccaccactccacctgggttagtttcccggggccgccataacaaaggaccgcaaactgggtgacttagaacggaaacttcttggctcactgttctgaaagcagaattcccacatcaaggtgtcggcagggccacacccgccctaagatgctagggaaggaccatcgctcccttccagcttctagtagcccctcagcttcttgcagtgtccccccagtcctcacgcggccttgtttttacaaggacatcagtcatatcggaccggggccccacacatgcacattccaatgtgtcctcatcctaacttaattacacctgcagtagccctctttcccaatcaggccattcagaggaaccaggggttaagacttcagcgtaagaatttggagatcacacttcaacccatgacatcatccagaggacccttggttggggaaggaggaagcatgggagagaggcacaggcccctcagggtgggcacatctcggccccatgtgaggactgggtagagacaacaacttttacaccagaggcccctaagtgcatgctgaccacctcggctggcaggcagtggtggagacaagagccttttccagcctctgaaggaattggtctatgctggacaactggtaactccactgtggtctccagggaagcaggttcatccttcagggagggtggggtaatgggtgtccacgggcacagcctgacccattgctgacggcaacagcagtgcatcatctcacagtctagaggtgttggccgggctgcgctccttcttccaaggctctaggggaggagccttctgcacttcttcccagcttcccgtggctgccagcaatccttggcactcctgggcttgtgtctgcctcactccaaacactgcctccgtcttcacatggccttcatccctctgtgtctcctccatctttctgtgttcaagtttacttctcctataaggacacccatcgttggatttagggcccaactaaatcccacaggacttacttcatcataacttgattatatcttcaaagattctattttcaaataaagtcacattcacaggtgcacggggttaggactccaaccagtctttctggggaacacaattctacctcctgcggagggtgaggaggactttacagatgggatcacaccaggactttacagatggggtcacactgtggtcagcatcaccagcaacggtcctcggaatgccagggcttcacctctgcccaggggcccagcccaactcccggcactcagcccatgatgctgctgccatcggcctgccgggttgaggttgtggcatgccctcttctcctctcttgtgccttgtcaaatgccttagagctccactcaactatcacccacctggcagaaccttccctgactcttctcccaagaagtcctcggtccttcctatgggccgccagaggcgcccgttcaacttcaactatcgcacatggcacatatcagcttctttgtttgtgttcccttgagttcccctaggcctgggacagagtcttattctcctgatattctccatcaggtgcactgttgcatggcgggccccctacatttgtcgagtgagagagagacaagggtggatggatgggggcatgggtaggtagatggacgtcaagtgttacctgaacagagaggtcttccctgacccctccacccgtccctctctcatccccttgccctgttgtgttttgctccatagcaaaacatagtcctttatcatatgatatactttgttgcctctctcctttcattagaatatgtgctctgtaagaacaagcatattgcctttctatttcagtattgtatccacagtgcctgaaacaacaatatttatgagattgcaggtgcatggagggatgggtggatggaggcatagacgggtgggtggctgggagcctgttgcctaggggaggtgtgtcactcctatcacagtgtcagctggtcacagagccacccggcacaatgctttctgctcactgtttgttttgccctccctccccatcccctcacccccagattcaagaattattatttttttatggctgtcatcacagggcaaggcctcgcactctctgcctaggattattaactatctggggctcatgttctggggccagagctctgctgggcctgcccttaatccctcagaaatacccaccacactgggttgtgagataccagcctcagcctgccctggagtgggctgattttacataacatgtttttgcaaccagagcaataacatgccgcccctcagtgtcatgtcttctgcaagcactgacctcaggacaggagtgtatgtgcacgtgtgtgttccacgtgtactctgccggcgctgcatgtggaaggagtattagcttccctccatccctggagaggcttggtttatataatctacttgtctctcaggcccatttagttaccggaagtggtcagatgttagacagacagggaactgcagccaggtctcagagctcaggggagaatggttctcatgcagagaggttggggaaaagcaggcagggcctggtgggtagtcccagtgtgctacagaggcacatctgactcaggtagaccagacagccaaaaagccagctgggaaacccaagggctggttctctcatgtggggagtgcaggaggtggaggggatacttatacctggactgatgtctacatggggccctttcaaagcacatagtagaaggatttgctgagcaaagaattaaagcaaagtccactgtatgtgcttttaaaggatacatttcccatttaccattcaagggatctatcctttttaaaaagcaaggagaggtctttggtctaaagccagaatactatctcccctggccaggccaccagaagcaacaacttatactttttccagatttcaggaacgtattggtccttcctgtcattgggtgccacttgtcttggacatgccaccttttccagccgcatcttaacagataatgttttagggcagctgtttccttgagattaactggtggggggcacttttcattttgattgatcttctcttcttctcctcctccttcttttccttgtcctcctcttcttcttcttcttcctctttcccttctcctcctcttccttctcctttcttcctcctcctccttctcctcttcctcattctcctttttttcttcctctgaacacatgccattccctctacctggaatacaccacccccagatactttttacctttttaattgagatataatttacataccatgatattcaccctctcatagtatacagcttagtggtttttagggtattcacaaggttgtgcaacgatcactactgtctaattctggaacgttgttatcaccacagaaggaacgcagcatcccttagcagtcattcttcattcttccccttcccagcccctggcaaccacggatccactttccatctctgcagatatgcctattatggacgtttcttaaaaactgaaatcatgcactccgtggtcctttgtaactagcttctttccctgaacatgatgttttcaaagttcattcatgttgtagtgtggctcagaacttccttcctctttatggccatataatactccactgtatatatgtaccataatttatttatccagtcatcagtggacgggcactaggttgttgccatgttttggctcttatgaacaatgctgcccagaccactcacatattaccttacctctcaccaatgactttaaagaagctctgccaacctgcatgagctgcacatctggtgacaggtttgtgactcagtacagactttctcctttcttctgctggcctcacacttgccccctgttaacacccaagtgttcttgttttgggaggagtgtaggcagcaccctgagttgtatgtgtctcttggtaccagctaccatcttgagtttgaagaacaagatggctgattttgaggggttctcaatggagcttgtgtcaacacagtgccccccattgcatgcaggaggaggttcccggtgctggaagttctatgtaaaaggccccagggaaggcagtaaggtccattcacttatccacctagatgccacattgaggctgaggccccaggtggccttatacataggaccagccctctatagccctggcctggattgttcctggagagggaggacctcagagggtgcaaggctttgttctgtcacctctgtcactttgttccactcatttttcgcctcactatagtcttccagccccaggccaaaaacagcataaaatagagcttctccatcctcccccagcacaccaccctggaccaccaggcactgtgcagattctgtcttccttccatggcctgagcttcccatgccctccctccctgcaaatcacttcctgctggactcttttccaaggctgggggctccatgaggacaggtgcctgtgctgccttgtttgtcctggcacactcagccctgagcagagtgtcaggatcacaggaaagataacgatgatgatgatgatgatggcatcgatgacagtgatgatgacaatgaggcttactatgtaccaagcattatcctatgttctttacatgtttctgaactcatttaatcctcacaaggattctagcagccagatgctattatctccattttacagatatggaaactgaggcacatagaggttaggtcatctgctcaaagtcacacagccatcaagaggaagagccaggatctgacattcacagtctaactctagagcacaggcctctaaccactgtcatggtttatacacatacactacatagatgtgagttgttctgggatggatggatgggtggacacaggggacctaacagtggcttcatgagaagccccgagtggcccggtatgccccattgagccacactgagtcttgggacagggttagctccccatggctgctgcctgtgtgcaggtaaggaggccaggaggtaggttagagcccagggctggaggcccacaccgaggaggctggcaccccctgggctcgtgttacactaggggctatggccagttccctctgcccggcctcagagccgagatcctagtccctgccgccgccggtagggagcctcggcttcctgtccattgtctccttggggcacacccggtgtgttcctgaagtgacctggagaggcagggagggagggaaagagggaagggggccagcccagagcctagtcagggtgggagaggggaaacgagaggggaagacttggtgtttttccttatttgtgttttgtattaaagaaaacaaataatatcctttgagaaaaccattaaacaaagcacatcctaaggccccagaggcctattgtggctgcctggagcccggaattcattcatgctttcttggctagattgttggaggcaagagagacgggggtgagaggaaaggattgttattaaaatgtattttgaaatgtgttgctccctccctgcactcaatccagtccaggccaagtggccataactccaaggtccctgtgtcctcctgagtctgttgttctcccattacctctctgggaagctccccaaaactggccagtcccagcatagccagggtggtcagtttcccccatgagcttgggggctgagccccgtgaaggcaaaacagtgggaccctcctttatggaacctgaatcccgagggctgcatgtgccccaccacagggtgtaacccacaggactatgatctctaactcactgtgtggccactctgggccttgggctccctgcctgtaaggtggggagtgggccaaaatagaccccctctgactgctctccagcagcctggaccctgtggctccctgtcatccagcgcatgctcaggtcgctgcaggtgggtgggagtcacactcaggctatggcctctgcatccaggcctatacccaggtgtcccaggtccaagccagaccactccctcccacttgactccaagccttggtaccccctactccaccccaggccgctcataatggaatggtagtgcatggtggtgctctctgccatgtccacaccagaacacacttttctgttggaggagggatgggaagaggtggtaagagcagagctggccatcagcccagcttgtgcaaatagctctgcctgtgatcctgcatttgcaggatctgccctgggttgcaaatagagggtctctctccaaccttgatgtagatgtagaaatagttgctgtcatgatgacaatacgcaaaagactatccttagaattttccccagttcctcctttaaagttgaaaaaggagcctgggcaacaaagtgagaccccatctctgcaaaaaatcaaaaaacaagccaggcgtggtgatgtgtgcctatgatactggctacacgggaggctgaggaaggaggattgcttgagctcaggaggtcaaggctgcagtgagccgtgtttgtaccacagctcttcagcctggatgacaaaacaagaccctgtctcaaataataataataatgatgatagtaatgctgaaaaagtaatttagctaattccatgttttcctaaatactccctaggcaatatagggaaagaagatcttgggtaaaaatttcactgggggtgcctggactaggtttaggagacaaatttcctcttcacagggcttagggttttcaggcttcacctccttggtcctctagcagcccagagaagaagggtaacattcccattgtgttatggaacttgtgcttagagaagtaacttgtcctgggatgcacagccagtgagctgcagaacctggccccagctctgttgctcattttctgcaaaaccttgaaccagcttgttcatctttccagatttgaatgtctcatctgtaattcaaggacttggacataatggattctaaggtcctcattgtccctactgttctttgattctgtaattccagcatcactgcctggtaggaagttcattgactctactgtttttcctttttcagtctggatttggtggttagagtctagtctctccaaactcttgatgtctttctgtcttagatgctggtgtacttagtgcagtcccagaggtgctttgctctctttcaggagttactaatgatcccccttcctccccccatgacacagggctaccacccgatgccccatgaagtggagatcgcacacaccaagaagctgttccgcaggaggagaaatgatcgaaggtaggagagacttcgtcgtgagctttgggttttcctttcctgcttctgccatctgtagcgacgtcagctttggcctgcatttcgcttttcccagtcaccagctgatcctgatgagatggggttggtggcatcgtgggttggttactggctggggattccccaggggcagagtggcggctccacttctcttgttggcctagggattggctcccttcaggcgtttggctgagagcccaccatcaccactgcctcttcctgggggtcaggcagtgaccaggctttgcagttcaggaggaaaaatgctgtttccgctgacctcaaagcaacaatagtggtcctcaaaaaataggactggctggctgtgtgttttgagacatggcctccaggaggctcctggagctcacaagtgcaagagtatctgttttcctcctccctggtcattgggggttgtccctcatgcgtgctggctctgctgtcacaggcaacacacagatcagcaatggcacatgctactgctcccaaattcctgggggaacccacttaaactaaggcagaaaccgagatctcctgtggagctcagactcccgagtgacaatggggccaggaaaggggcaatgaggtagccctggataagaacatgcagctgaaattgagcatcctgggaatgtgtgcatttattttcaaaaaggctttcttataaggggagatcttcaagatatattttaagtggaaaaaattcaggtgcagagtaatgtttcttatgtgtggtcatttatgcaaaagggggagttagagtatattttttgcttgaacatgcataaattatttctggatggaaataccaaaaaaagaacgaacaaaaaggcttatgcctcaggaattaaaatgaggtgttcctctatagggaatatattcttagataaagatgacggcttttggttctacctttaatgaacagagaatgttctctgagggccaagaaacagccggtggacatgccttgctcagaaccctagcggcgcctgtgctcaggctggctggccacctccttaggctgagaccagggtctctgatccttccctacgcatgcacaccctgaatagggattattaggtggtgactgcaactctcagggtggatgtaggcctgggtgcccagactgctttgtcatccactggtggattaagtggatctgaacacattcacagaggatggcaaatgtataagtagcttgggaagaaggcagtgtcctggcttagaaatcagaaccaccagacactttctgtagaagcaccaggcatcaaaaaggaacactgagcaggaagaggtggacccaggcctgttcctgccttgaccagagtacagtttatcgcatcgtgtgtgctgcctttttgctgtgcagcatcacagaggcaaattcctggtttctgggttcctggtagagggaagaaggaggcagcacccctcaaggaggaatagggttcacaggggcctgggaggtgtcagagagagcaaaggctttatgtcctctgcctctggccctgtagtctctgatggcagggaagacccagagtgtgtgtctgggaggtgtggagagtccccgagcttcctgatgagaagtcaccctctgccccacctctctgcgcccaggcaatggcaggctgccacccagcatccaggtcagcctgcatgtccatttctgggccaggtcacctcactcagcaggaagaccctggacagtggcaggcctccggaaagcagcagcgtgacccagggatgtaggaagaggagcgcggcatgcaacggctgggaagccgagcttccgctgagctgcgctcacattcaccaatgtccgggttaggtcagcacacctcccaaaggatgtggacgggccagggtccaaagtgaggcaataaagatgattaaaggggtggaaagtatgtcctgtgaggagtgctggagggctggggccagggaagaggaggccggagggaaggaacatcgtgccgtgaaactcatgaaagatttatacggagagatgaggggccgctgcctccatgtccacagggacccagactagaggaagtcagcttggatggaagaacagagttttcagctagaccgaagacagacttatggagcaaacatcttgaccatttggggcaacactgtgcaagtcagagcagcagccatgcctgaacacagagcgtgtgctcgtcggggcgccccgctctaattcctcttctagatgcggtagaatccgttactcactcacagcctggagctgtcgtggagtcctcaggtgatggggactttcaggaggaaagcaggcagccatatagtttaaggacctttttgtctaaaagcaggggtctcctgagtctgttttgggaaatcgtgggattctgccacccaaagagccgctgcagaatattatcaggtgacccctaaccttcccagctaatgacccatagtagtagccttgctaagtgtcaaacctgcatatttgaccttggaagtccatacttgtgtgcagcaggttcaccttcctaatattctgggcttaaactacactgggaggggcttgcatttcctgggcacgcatggtggcaaagggagaagtgaccagaatcagatttggtggacaaagggcacagccagcatctgtgccatgcctctgatctccccccaccatatgaagggaaggggccagctgtatccctctggtggcttggtggctctccttggaatggagaggagtctgtggctttccatcttcctgcaaagtggctggagttggtgtccgatagctgcaaactccaggcagcatgagcgtgctgctgaagctaggagcatgcaatttcccacagcctggagcagggattttcagactgggacctaaagtcctaggcttcatcaaagtctgtgtcccatcccagttccagctgcattctcaggggtttttgtgtgccttactgcttttattttccacttgtttaagtctgaggctgttagcaagctgaattatatagcagtttagggacatgccctggaattaggagctggatgggaatcccacctcctctcctcactcaccctatgatcttgccaattacatcacttttgaaagccctgtcccttcttctacaaaatgggttcactagtcagggagctgaaaggagctgattctaataaagcacctagaaacacggtcttagtgttggcccactctgcaggtcagagggggtcctaggtgctcaggaaggctttcaaggtaagtgtggagcacaggtgtctgcagtgagcggggagcttttgtcctgtgattgtggcagcaaacccggaaagccttgccctgcattccctccaggggcgggccgctaggatcaattgttccttcccctggatccacttttaaagccctacccacactgtcagagggggcagagcctgggctagcagggaaggaggccccttcagagtggtcacctgcagactctgctcctgatgccatgggctgcgtctagtgaattgtggatgtcttttttccattttgaaaaaaaaaaattaagctcatggacagttcaaaggtttcctcaagaatgttcttgacatttgaacaactagtaaccacttgtttgtttttggaagctaagaaaagacatttgctgatttcagacaaaattatgcattttgtgacataaatgtgctaaatgagtgttccacgcgttcctcaaagagcagcatgccttctgatgctctggccccatgcaagttggagacctgttgcttggaacgggggctgctaaggctcgttcccccccttttctcaaagctttctgcccagagcacatagaccagaagagcaagctcactagagggctggagacccggcgcactgcccaagttgaccctgagtgaggtccctcaccgctggggaggatattttctctccccaccacaccctggctgcatttaagagatgaacacattaaggcaatgaatggatgttgtagcctgagctccctgggaagcaggctctgggacagtgattatcagcagctgcttttaaaggcatgcctttggtgttgatactggtagaagatcaaaagaggaagtggtatcagcagagagaagttgggctgcagtgcagtcttagagagttctgagcctgtaggggaggttctgaagttgggctgactctttaagagctgtcccaagatggggtaaaggggcaggccttgatacctccatgtctgttggtcatcaggcagggactgcccaaggaagggagcgttaccttgggcggggctgcgctctttgcccagagcagttgtcctaggggttggcagctgagggctgtctgcacagcacttccagcagccgggaggcagtgccccgctcctgaatgtgtatcacagcagacactgcagtgaagcactgttcagttctcctactgggattggttgggctgtaccctgtgccataagctgtgcccgagaatacgggaagtatagggtgtggcccctgctctcgagggcctgagctgtagcttgcacaatggtgccttgactccagaagcaaccagaacgctgtgcatgactgtcagtcatccacgtgttaacagggaggaggcttagagaaagcagccatcctgggagatgctccagaatgcttcctggaggaggtggggcttgaactactagtgagacctccaggaggatttgggagatgggagggtgttgggatgagaggagcggtgcttgctgcctctgtcctgtgattgaccgtgactgtggcttggtgtcctctaaatgctcctctgcatctaagcaggctctggagccagggattccccacatccccagaagtcgtccccacatggctccctagaaacagagccatgtgggtggtgctcacagcggccaccacccccaattgaactacatagaagggaaaagccactggagcctgccagctccagatgatcccgcccgactgtcagcaatgtcagaagaccctgcaggctccaaagcccggcctcttaaccatcagaagaggtggctaatgtaggcattagtggtccatcgcaccgtgcctgtgcggccagggagacaagagagccattctccaaattaatttgtttcattaagtgaggtctcggaatggttaatttactccatgtgcaaagcagattgaaaggaagaagagaaaaagaccttagccagcccagctagtgtcagatggctccgcaggactagaggcaggggagcgagccatccacctggcgtgcggagtgggccacatgctggacgttgcagggtggccacagcctacagcagcgcttgctgcctctgtcctgcgattgaccgtgactgtgatttggtgtcttctaaatgtagaaccaattaagaattttggggccgggcgtggaggctcatgcctataatcccagcactttgggaggctgagacgggcagatcacctgaggttcaggggtttgagactagcctgatcaacatggagaaaccccgtctctactaaaaatacaaaattagccgagcgtggtggtgcagcctataatcccagttactcgggaggctgaggcaggagaattgcctgaacctgggaggcggaggttgcagtgagccgagatcacgccattgcactccagcctgggcaacaagagcgaaaatctgtctttaaaaaataaataaataaataaataaataaataaataaataaataaataataagaattttgtccctccctctcttcctctgccaacgtgaacccagaccctaagtgtcagtcatcagattggatttttcaagctctctgtaacatcatctaagtcactgataaaaacaaacaggacatatggaactttgtgaatagactaaaaagcactcaattatatactttaaaggagtgaattttatactgtgtgaattatatctcaattaaaaaaaatttaaagaataaggcaggtcccaggatgaagtgatgtggcaagcctcttgaaacaccccttcaaaattttttttagcaacagggtcttgctctgtcacccaggctggagtacagtagtgcaataatagttcattgcagccttgaactcctggcctcaagcaatcctcctgcctcagcctcttgagtagttctagggactataggcacccgccaccacacctgactaattttatttttattgcttgattgattggtagcgatggagtcttgctatgttgcccagactggtctcaaactcctggcctcaagtgctcctctcccgtcaaccttccaagtagctgggattatagacacaagccaccatacccagctacctcttcaaccttgatattttcagggttccctaaatgtgtcaggctagtaactgtttcaaaaaaggacatagatttggtctggccatgacttggtctgtgtgaacctgtgctagctattagtggtcaccttttttcttccaaaccatctgtttggcaatctcttttggagaaatgatatccatatttttccaatttttgaaaattagactgtgtatacctagctacagtctctaacacttttgttgcattattcagagttttccagagaaacagaactgataggatatattgagaggaagagagagagatgtatcatgggaattggctcatgagattatggaggccaagaagtcccacagtctgccatctgctgcaagctagagaaccaggaaagccagtggtgtaatcaacccaagtccgaaggccaagaaacaggagcatgtatgaggttcccagcgtgaccgtaagcataccatgtgttacagcatgggatgtccaagggcaggagaagatggatgtcgccactcaagaagagggagtgaagtcacccctcctctgccttttgttctgtttgggcccttggcggattggatggtgcccatccacactgggagagagatctttactcagtctactgactgaaaatgtcctcatagacacacctagaaataatgtcttaccagctaactgggcaccccctagcccagtcaggttgacatgaaattaacccttatatctgttctccaggattcctcagacatggtcaggggccatttatgacctcatgtaaagatttcttttactccaatcaatatcaatatcgccccattcccgaggcatgaaggtgagcactcagagcacccattgctctccgtggagtcttccaggccctcagcgtctgacagatgcggcaactgcagctgccttttctgggctggtacctgttctcttgcagaaggcaaacttggagtgggagaggtctactttctttttgccacctcttaattctacgctgtctgccccatcagtagcctcatgtgtccctctgacttctcactctcaatacgaaaatatgcttctagaattgtctttaatatttttaagccccattccttgacactgctgtggcttctgtatcccaggctttgatggtcatctgtgactacaggaggccccacattccttttcacatgtgggctcatgggcaaggactctgggggataccaagtgcctctcgacatccctctctttaagtcacagctgctatctggaacttgctgctccttttagcacctcagaacactctaccagtcatagagtcccacatcctacaaaaatgaccaggtcccccagatcttgcccaccgggaactgatgaggaattaacctagtcggagtcctatatctatacatcagctcattcacatgagttgttaagatagctcttttggaagtgcagtccatccttattactcattgattcatatttgcacattcgcctacttgtaaaacttatttgtaacaccgcactcaatactcatggtgtttttgcagtcagtcattgacacacaaacagtgaaaaatttgagttgcctgacctgcaagatcccagtccaggccaaagtaacactctgcctccttgtttcagctctcatagtataagcaagcacccttctcatggttctgtttactgccatgtttttcacatttttgtgcttttccttggtgaatttgctattttaaatggctcctaaacatagtactgaagtgccgtctactgttcttaagcgcaaggaggctgtgatgtgccttccggagaaaatgtgtgtgttagataagcatcactcaggcatgagttatagtgctgttggccgtgagttcaatgttaataaatcaacaatatgtattaaataaggtttctttaaacagaaacacatacaaaacgaggttatgtattgatccagtggtgaaaatgttgtgaccagaggcttgcaggaaccaaaccccgcatttcccctaggagtaatagttcagtattcactaattcagtatttgcagcaactttatggaatgcaactaccataaataatgagaagtgaccgtacttgctctttaaaacagagtagagagatgctgaagataaagaagtatgttgtaggcaacaggatcttaggtctgagtgatttatcttgttcgtgtgtggtggtagcttcgctaggggatgagatggggacgggggggatgcttcttccagtggtcattgtcctgcatggtttgactgagcctatcactgcttcatttgcaccatgctgggatgccactgttgctgaggccctcgcagacagctcagccctgcagtgactgtcattgccatcctgtcatccgagcccagggaccgcgagacagatctatgctcactttgcccacggtttgtctttccatcccagcaaggaaattgccctcattaagtccctgctaaagatagataagaaaatgggacaggcaaacccccacctggcaggcagccctgtcagattctaagcaaaatgagtcagataagaattatttttaggatccttctcctcctccctcacgcccacccccaagcaggctctctcttgaaaagaagagcagctcatttcttcaagccagatgtccaggtccatgcttgattgaaatggagcccctgatacacccagagaaagccccacgctttgtacaaatcatgagggtcccaataatcctttgcacagtgcagctgcctcaggccgcactcctgggcagaacaagctgcagagagtggccctgttgaggctggcccacaactcacccatgagggatataccttcccccgatccccatgctcaggacttcctcccagcatcacacttcatgggaatacaaggctctgggggttctctcccatcgggacccacatccacgcgggggacaaatgggtaagaaaagaggttgcctacagctcattttggcagagccctggaaccccctatgcccaccaggcagtgggcatcccctagttctgtgcccacagttggagagcagagtactactctttctcgatcacaataatccccttttccccagcaattagaattccttcagaccccttaagccctaaatagcaaagggagacccaatgacaagaaaggtgactgaagaggacgtaggggcacatgtctagttacctgcaggacaggagggctgctccctgagaaactggccctggagagataaatgccatttccccaaggtctgcgtctaggatgggacgtagaatggacgccttgggaaccagccacccaagctggtttcattcctcctcagaggtctagtctctactgaaatgctaggcatttgaggattggctcacaaacactaacacccaacccttcattcctctctggagccccaagcaacctggcctctggcaccaagccagcccagccctccccggggacagtgtgtctggtgggcagcccaggcccagggcgaggctcactggcttcaagacgagctcatctctcaccagccaggggatcttgggccctggacaaaccattcttcttatgtccccaaggacaccattgtgcagactacagggatgccattagatgccatgtgatggcagatacgagggaagtcctgaccctgtgtgcggctctgagtctaacctcagagaacgtgcatccccccctctctgtcctgacactcactcctgtgcaggaagaaaagaacactggaccagaagtcatggaatctggattttcatacttgtggtgtggttcagagcaattctcttacactttaagggtacacagtttctcagctataaaatagggctctgatttcagctctacaatgtattagagagagtgcgaggtgaagatgaaaagggacacttctcagggatattccattccttaaccatgggatgggaaagacagttctgaaagacatgttggaggctggccagggctttcagtgcaaataaccagtgtctcgtgtatcttcagctcagcccatgtgccctgtccagaaggttctagaaaggcagccatgcctgctgcccctgtgtatatttttccttccccagatctggcacacagtcatactaggctaagcctcatactcctggccctgtgcttttttttttttttttttttttttgtgagacaggatctcactctgttgtccaggctggagttgcagtggcacaattatagctcacgacagcctcgacctgctgggctcaagtgatcctcccacctcagcctcccaagtaactgggaccacaggcacgtgccaccacacttggctaaattttttattttttattttatagagacagggttttgccatgttgcctaagctggtcttgaacccctggcctcaagcaatcctctcacctcagcctcccacagtgctaggattaagggcatgagccacagcacccagcctctctgtcctcttgagatcgtatgctgcccaggaccgcaagattcacaggtgtaagtacccagccatacctgttggtgctcacaggtgtaagcacccggccgtactcatcggcactcacaggtgtaagcacccggccgtacccatcagcgctcacaggtgtaagcacccagccgtacccatcagcgctcacaggtgtaagcacccggccgtacccatcagcgctcacaggtgtaagcacacggctgtgcccatcggcgctcacaggtgtaagcacccggccatacccatcggcgctcataggtgtaagcacttggctgtactcattgatgtagcaggctgtgcatcccactggttctgagggtctttttcgctagactcccaggcaagcctggcccaccctctgccaagcctggatgtcactcagcaattcacaagcacttccagagcactcactgtattcagggcaccctttagctcatatagtcttcccaatgaccttaggaaggagatgctatttttatttccaatttacagatgaggaaagtcactagtccagaaaagtgaagcgacacaagcagcctggcttccaggcgtgtgctgctaacaacccactgctctgggaccccctccttccccatctgcagactcagcttccgtctgctgggcccctccctggctgcctcctacatactccccctgttaaccacctgatcaactcacatgcacggggagctaaagacggcatggtcctctttggggtgagggggctgtcatgtcaaatggactaggggagggctgctgcctcattcaaagggatgaatgaatgaatgaatgaatgaatgatgagatttcagatgagaccctcagacagggtcacccaccctcccaccttctccccacctgcactaggtcagtcctgcccatagattactttccttgtctggatgattcatgaatagacatatttaggaagccctcgaaactgaccagggatttcccagattgtggggaccccactcgatgagcacccagagggaaagttctgtgagttctggagtggtgggcagctcagggggtggggaggcagcccggccagaggagagcttcctccagctgttggctcccctgactcccaagaggacaaacccagagcatgagggtgcctttcactcctcagggctccccaggagagacaggggcacaggttttaaaaataccaaggagctttcctcctgggtcggcatttaccctgaactccaagagttatttctgagtcttcccagtaatttaattatagccatttattccaatgcatgtgttttggggaagccaaggtggcctctattacagtttggaatattttgggaggccttggtttccaaaagtgatgcagggactcaattaggcaagacaccagcaaacagaaataaaatagctcaagaagataggccctcaagttcccagaggcgatgcctgtacttagcacccacgggggaaattaagatgaagttgtcccctgggtgcttggtgtagtcatctctgtagcagcagcatatgccaccttctccatgtctctaagcacctgcagggatttcaatgcccttcaaattatgggctggatggggttgcccattctttccaagtaggcctggacagatgaacagcctgggcaccaggatttaggtcccccttgtaggtggacacagactcaccaacaacttgtgggatggcattatcaaacagcttctaacctttcaaataggcctttggaatcctcaactggttcgcgctccctgaccccctgctccttgtagatggcctgctccacctgccctcagctctgtccccacctaccctcccacccactgtcttcactcgctgtgctctccagaccccagtcttctcgctgttctttgaacaggcctgtctctgtcctgctcccaacactgaccagcccctgtacctcagtccctctcccttgcctcttgttcctgctggcctcctctgattctgcaggttctgctgactccttcctactcctccaccccttactattcatggcctcattcatcctcccttgatcctcttccctgaccttccctacagctgctgggcggggtccagcctgacacagactgagagctttccctgctgtgtgtgagctcctgggctcacctgaagcaggtgcggccactgagggacttagggaagggcagagggccggagagcatccagcacacacattcattcatgtctggagggcaagccccgggatcctgagtcacctcagcaggtggatagaggagcccaaaacagaagctgctgcctggagcccacattatctgcattgacacccgcctgcaggaatacgactgcccttgtgttggctttgaactctgtctttcagcttcaaggggaggatttggtggacaaaagatctaattttaggcttattacttgtcaggactgacattgaactcaagaaaagacatgtgtgaacttgaaacaaagatgagaaatgtttttagaaagagaaaatgtgttctggggtggtgtgcatgtttggtctggtggtctgtgtggccacagcaaacacgtgttccagactggctctgcatgtcagggagcagatggctcggcctggtcaccctgagcaggaagcttgctgcctttgagctgtgagctgcagccacggtgcaaagaggctgggcggaggctggggtgagacacttagagggcaggattctgactgtgccctgatattcaggagggctggcggtgctcagtcaggggtagggtaggaacagtgatcatcagggcctctttaggcagagcacacaaaggccaattccctcccaaggctccaccatcccaattcctgtcccaacgcccctcctaggatggcaggggagcctcggcgccctttccgggagacagccccggtgtattttgactgtgcttccttactctacaagcagtcaaggacagccaccttctgccttcccaccacccccttagggtgagaatgaggaggagctcccaccttcctctactctcatgctgccccttttgaccccagatttactgctcctgcatcccgttttgtgaactggtgtgtcagtggttgatctacccttaatggtaacccagggcatgttactttgcattttcacttgagccttcagtgattacccagagttaagagaatgatttagtttctggcacactgagaagctcccacgtgtgggaggtaggtgagggtgggtatatgtcatgttatttcaaggcagatttttttgctcctaagagcctaaaaccatcccacttgaggcaaacccacattttgcctctgactttgttgcctggaggtcatatcacaggagccacaccagggcccttattccagcctaatgtgtaggtggtcctttgagaatgctgagttgcctagacttcattcgagtcctgtcactagatatgtagcctcaagacatcccttcacctctttgaggcatgttgctcaactataaaatacgatatccaccttgtaagagtgttctgcagttcaaatgaggtgatgctcagaaaggaggtaaaatgccaagggcaacacaaacctgaggacttattgcctatatttgtgtttgaatcacacatgttcggtttatgtttatagttgtggatatgtacgtgtgcatgtgattgctttaggactctgctaatcatcatttccaatgataatttgctggaaatggagcttggcttggacgtttgtattggggttatctattgctgtgtaacaaatttctccaagacgtagagtttaaaacaacaaatatttattatgtcacccagtttccaagggtcaggaatccaggagcagtttaacagggttgtcctagctcaaagtcacccttgagagtgtagtcaaactgtcagccaggggtgtaggcatctgaaggcatgactggggctggagaaagcccaagcagttggagaacagcctccttcacaaggtggttggcagttctcagtttctcattagctgttggtcacaaggtggacctcttcatagggctgttcatgacatagcagctgacttgtcccagagtatgatccaagagagacagacaggaagacaagcagacagacagacaccaagatcgaagctgcagtatgctttgtaacctaatcttggaagtgacatgccatattctaccatattctgttggtcacatagactaaccttggtacagtgtgggaggggactttacagggatataaattccataaagtggggatcactggggacaatcttagaggctgactaccacaacccaccctctcattcccagtgactcacatgcaaaatagtctcacccctcccaatgtctcatttgattatagcatcagctccaagtccaaagtctcatcatctagatcatgttcagatgcagatgacgctctttgggtgtatctccttaagtacagcacctcaggtacagttcactcttgatctgtaggcctgagatttaaggaggcaagttagctgcacacacacacacacacacacacacacacacacacgtagccaacatacaattgtgggacaggcatagggtaacagccttagatacacttattcaagaagaggggaaacaagaagcacatagacattgttggtccatagcagttctgaaatccagccaggcagatattggaagtttcttgattagaactcagttctgttcctgcccaggaattattctacaaggctgtctccgccctctgcattcagggtctttcatgagattgcagcaagtcatgagcccagtgaatactctgggctcttggttctgcctctgagtcatccttccttttctatgaaaggtagcatgtctttgcagctgatttgttgctcagatagcttcctgctggtagaatttgggaggtccaagagcttctttatattttgtactgtgtctctcccttccagtccaagttgttgtgtttccactgaaataatcctttgaaaaactttatgggtcttctgtgatcctattgagtctgttccaccaaataaaagcccacccacacatctcttcaagaccatcccttctctccgctgggcttctgctgagggacaatgcccttaagcttcttagaagctctgttgtttgactgagaagatctttaacatctcttaaaatctttacagagcttttggtctgactgaatagtactctgaggcagcaccgctgaactttctaagatcttgacaaagacttcatagccacaccctccacctcatctttggactatgctttcctgagagtgcctggatttgatctttacgcagaagtcatttcctaattttagcatcatttgccatctggacagtctgggactcttcaaaactagcaagtcctggatttttttttattgtgacagcccttcttttaacttgtctctctcttctcacattttacctagcaagaagaaaccaggcagcccctgcaggaccctggctaaaaacttcttccttagataatgcaagtcattaagtacattttctgcttttcacatatctgtaggagacaatgttgctaaacattttggggctacataataaaaatcctccttcctctaattcccaataatatatttttcacctcccttaaagcccccatcaccagtctcctcaaagtccatatttctaccagtggtctcttcatggcatttgaagttttcactaagaatcaccccagaatgcttctggctccggcccactgcccagtaccaaagccactctcacattgcagagtttcactatggcagcaccctacttccaagtacccaaagctgtattagttatctcttgctgtgtaacaaattactccccaaatttagcagcttaaaataagcacttatgatctcacacagtttatgacggtcaagcatccagaagctatatagctggggagttctggctcagggtctctcgtgagattgtggtcaggctgttggccaggattgcggtcatctgacacttgactcagatgggactggaagagccacttcccagctcacggatgtggttgctggcaggccttggctcctcactggctgttggctggaggcttcatttccttgcaacgtgggcctctctgtagggtgctcatgacagagtgagtggcctgtgaaggagggagggggagagtgagagagagagagagagagagagaaggaaagagagagataagctgttggatcttttgtaacctggtctcaaagcaacataccatcccttctgccatattccattggtcacagactaaccgtgatgtggcaagggactaaacaagagtttgagtgtcaggaggtggggaccactgggagccacctttatctgttttgagttccttcctgtaccattgctttttccccccactttaaatgatctagtgaaactcaccggtagctttgaatgggttgagggtttttgtgtgttctgattcaacttcaaacctctctacaaatgccctcctcatcctgtcctcccctctgcgcttccatccttcctgcccatggcccctctccatggtggggcatcagtgaagacgcttcctgcctggggaagatttgaagccaggggatgctgttgccagaactttggaacacccctcttacccagggggtccagcagatagttctgggaaaaggaaactttccaagatacacacccaccttccccccaccaccactaccacacacacagacacacactcacacatgtaattattttcccttaaactctataatctcaatgattataaaaagtttgggctttaattggaagcatattgaaatccttgcatctgtcagacactgacagagaaggcttccttgcttaggtgggaaaataacccaaatattaacaacacaaataaagatggctcccccagcctttctcacagcagccgccagtggtctgggaggcagtaggatgagagctggcgtccccatgagaagagtgagatcagcgagactcagaaaggtgatgcgatttactccaggccttgcagagctgaggctggtcccagacatccagacgtctggattcttttccacagggttctggaatgttggtcctgtggtggaaaacacgtgctcctttttcacccacttggggatccgtggtgatctggagttgtcttcctgtctggggagggtggtcctgcctcgggtagaggaccagatatggtgggggttcagaatgctgtggagggaagtccctcagaaacggaaatattttggcaggcatgaggaaagattgtgagggagcacccagtggtgggacagtggcgatggacagaagaggactcctgttaatccgctctttccaatccacccagatgcccttccctgcattttgaggcatccctgggaggactgcctcaggaggcttcacctccaggtggagtctcaggtgaagtaatagtagccggctttgtccacagctgtgctgcccagcgcagtcaccacgagctgcctgtggtgatttacacccattacaattaaataaagccacaagttcagttctgcagtcatattggccacattcagggctagccacatgtggtgaagggcctccacagtgtgaggggcccccgaggtgtgaggggctcctgtggtgtgaggagcccccgaagtgtgaggggcctccgcggtgtgaggggcccccgcagtgtgagggcctcctggggtgtgaggggcccctgaggtgtgaggggcttctgcggtgtgaggggcccctgcggtgtgaggggctcctgctgtgtgaggggcccctgcggtgtgaggggctcctgctgtgtgaggggcccctgtggtgtgaggggctcctgctgtgtgaggggcttccacggtgtgtggggcccctgcgctgtgaggggcccctgtggtgtgaggggcttccgcggtgtgaggggcttccgcggtgtgaggggctcctgctgtgtgaggggctcctgcggtgtgaggggcccctgtggtgtgaggggcttctgcggtgtgaggggcttctgcggtgtgaggagcccctgaggtgtgaggggcttccgcggtgtgaggggcttccgtggtgtgaggagcccccgcagcttgaggggcccccacgatgaacgcagtgtgaagggccccctgtggtgtgaggggcctctggcagtgtgaggggcttccgtggtgtgagggacccccgcagcatgaggggcctcccgcagtgtgaggggcttccacagtggaccatgctgctctaggacgttttcatcatggcaaaaatcctgtcagatgaccctgctctggggaaactctcccagcccagagaggcaggcatggggcagttgcgggagaagagaaaagtggagaaccatttggaagggtctgggggccagggaaaaggcatgaggatgagaaagaagaagctgagaaagagaaggggtgctcatggagcagtgtgtggcccctttgggtgctcaggaaatggtcattcctctttgatctggggctcagagaggcagacagtgcctaccctgttggggtttaaaacccacaagggaggaccacctcctgcagcaccttctctcaaaagctccaggcccactctgcagaccaccaggacccccaagagctgtgcagcctcaccagcagctgatgggcatcactgggagggggtagagaaggctcattatgatggtcaattcaggacaaatcctttggaatagggagagatgcctggaagcttctggagaatggagaggtccccatttcctaacccaccattggtcctttgtcaccatattccccaccctctatgcctgagtggaactccgttaaccctctcattcctggagaactgcacaaaccacatctcaacaatgtcttcccagtggccacctaactcagcttagggacctagtaagggcttggtttgtctgtgataagtgaaaggtgtgtggatggatgggatttcttcaaagtcttatatggaaattatccatataaaccactgaataaagaagacctctttagtttttagcgggttgggaccagaaacccaatggtcccttaccactgcagtgacttcattcccgcttattataacagcaattattgaagctgctttttatgggacacctcctaggctgtgcattctatctggattaggggtcagcaaagttttctacaaaggaccagagaataaatctttcaggttttgcaggccatagggtctctatcataactcctcagctctgccattgtagcacagaagcagttatagaaatatataaatgaatgaaagtgactgcttgccaataaaactctgtttccataaccagatagcggctccattcggcccacaggccaccattggccaattcttgttgtaggttatcatgaatcttccaacaccccgaagagaatgaagtttccattcctaccttacagccgaggagaccatgctgcagcagtgcattcacctggccgccgggctcacatgccttttgaggcagacctaggcctatccaagcaggactcccattccctggggtacgttttgatgtggaactgcagaaggccttgccagaggctgccacgggagacctcaggattcggggtacccaggagtagccagtgatgcctcaggggtaacagaagaacctggaaggctgtaggaaaaatagaagcctgtttcccctgcttcactgaggttgtaaggcaaccccgagaaggcagaaggggaccagcagggcagtgcacacccaggagacagctcttaccttgatgacggggctgaccagccggacactgccctgcttggaccttttttatgcccaccacagggcaaccactgcctccagcatcccccctggagaagctgctgcaaagccgtccccttctatgggagccacagcttgaagctaaaacaagagcccaaagcatcttcaggtgtaagaagaggtctctttctttcttgttctcggcagcccatccttccccagctccttctggacatgaggtttcttgttaccctcttcaagttcctttggctcgcagcattgcctctcctccagacaatatggcctggccagtgtgacctgctcctgtatgccctccagccctccccagccatgccacggagggacagagctgtccagatcccagccagggtctccaatttgtgcaaggcaggaggaggcacatgtcactgatgtgagagctgtctaagggtttcattcattcgcgttttcaatagaggccgtggtgtgccttgcagatatttgatctacatcaccataatcagacaagattgggcatgttcagggtggtgtggctgtagacaacatcaccatcatcagaaaaagaaggaggaggaggagcgttattttgagaggcatcgggggcctggttgcctggactttcatcattagtgcatgcttatttgggttaaaaattcataatccctgtggtcccttccaaagcgtagctgccctggggaggcagtatcccaaggcactcggacacctctgtcactaactttttcaagtttgtggattatagataagggaggaggcgaggaggggccgagagggaagtgggaaactgtgtgggagggggtgggtgctcagagtggaagtgaagatcaagctgagtcctctaatgatggtgctgggcccctgcctgtctcttctgggagtcactgcctccatgtgcattaaccctgcagatccagccgcagcctgagtgttgaatagggctagctgagctctttgctgaccactgtctccagtggaaaccactgagtgcagggtcaggagtggggtgctctcagacactgatggagccatgcccaagacccagggaacatcctgtggctggggaggagttacagggaaacagattgtcgggcaagggtctctggcccccctccctggcagtcgagggcacaccagtgtctggagacagtgtgggtgctgagctggcacatccaccacagagcaactaggattattgaggagaaggaggaaaattatctgagcccacctagggttttcatttgcagcccgtgatgaagtcagctggccaagaggtcagcttcaggccacgcctgtggggaccctcctggctcttcacactcagctcccaccagcccaccccagagtgcttgctcccaactcaccctcgcagcccttccccctggaaatcataactaagccctcccttcccccagtctctcagggctgtctcagaactaagctttccagccggagaatgctcggagcatttcagcaggggtcttcattctcaaggaggcgggtacaatttggggctcaataaaagggatatttgaaaataaagctgggcatccacccagcaaagccagttggcaatgccatgagggacgctgtgttcttctaactctgctaagcctgccctgtgagccgtggctcaaacccagcatgggaacttcctgtaggggaagaggccaggctgtttggaaaagagacctcgagtccccacccacttcccctgggacaaggagtggggagaccctcggctgcaccttctgtcccccacccccagcattgctgtggtcagagataataccaggttagctacattaaaattatttgggctgggctcagtggctcacgcctgtaatcctagcactttgggatgccgaggcaggtggatcacttgaggccaggagttcaagacaggcttggccaacatggtgaaaccccgtctctactaaaaatacaaaaattagccgggtttggtggcacaggcatgtagtccccgctactcgggaggctgaggcaggagaatcgctagaacgcgggaggcagaggttgcagtgagccaagattgcaccactgcactctagcctgggtgacagagtgagtgagactctgtctcaaaaaataaaataaaattatttgaatcccaggattcattggggttcatttgcatcctgttcatcatcacggcaacattctgggagagaaagggaagacttccaagaggctgaatcactttgcagtgttgacctcacccacctcatgaccccagggtggtgggagcaatgcccttcaccagcccctgtatggataggaagcaggggctggagaggaggttttggtcaggaagggaggctctgtgaatgcttctcgcaagcctagactgagccaggcattagaggagcatcccgtctagttggagtgaggtgattaagatatactgaacaatttacacttaatatcatattgctgtgtgtgtactcctgtgtacatatacatatatggtatatatgcacatgtgtgtttatatgcatttatatgcacacatgtatgcatgcatattgcatgtgtgcaatatgtgtacaagtatgtatatgcatgtgttatgtgcctatgcatatgtgcatgtatgtccagtttgtgtgcgtgtgtgtgtgtgtgtgtgtgatggcacagtgcagcccataaggccctgtaacttcagagaaaggaaaggctttgcagtttagagtagccaagaagccttcctggaggaggtggaacctgatccgtctctgcaatggggccagcagagggcaaggggagagcattcctgataagtgactgagcagagacaaaggcccagaggtaggagcagagaacactgttaggaaagaggccaagccagggaggaaggtgtgagaagccagtgaagaattagagccagtgcgccaactcttcactgcatctgtggctgcatctttggatgtcttgcatgcagatgtacaggcagcaagtccaagagagcgtgttgctggagggacagccggcgcacaggcacgtggcaggaagcacgtggcaggtggaggatgtggaggaagcaagtgcatgcttgagagaaggagactggaagactggaagctaaaaggggaaagagggaaggaggtgaggacagggtgtttgaacagattctgtatctccaagtgtccagtggagccttggattttgtcttgagtcccagagcccagttcctacccatttagttggagtcttgaggattcttgccagtgattaagtttcccccatcaaaataggctatgatggagacttgagattcccttacccaaaggtgcctgggtctggtgagaaggaggaggcgctcccattccatctccagtcctccctgcgagctgcagccatcaatctgggacagagatactaaacactccgtaaatgtttgtggatggcctcttggggagggctgggctggttgtgatcctgtatgtcatgggaagcggaggagttggaaagggcacacccgggtggtctggtggttaggatggccccgttcctgggaatggttgccacgaagcattttccctggcttctccatagaagcgactgttccttcccggagtgttatgaaaacctgcaattaccaagccgcctctgggtgcgagcattcagacctcctcttctttcttccaagatacactgagtcaagacctggtcagtgcagaaagcgggttcctctcccacattccgtcccgcatagccccatggggctgtggttaatgagcttggtgattatgtatttcatgtctgggatgaggaaggtgaagggcttgagtgaatgcctgtgcctctccaagttctggagcaagctgccttctgcactcggcatgctctgggaccactcagcagataccaccatgtctctggggtttggggtccccttcttcctccagctgcactgagtggaagccagagctgtgcatagaagctgggagaggactcaagcaggaatgtgcaatgcagggcttcatggaacgctccacccagactgccgccttgggatgcccagagtttagctctatcctgttcctccgatgattttccttctgggcatatatatttcctggcctcttgcctttgcatgtgtgagtcgtgatgggggttgggggaagaaggaaaaacatatagaatgggtggctccagacttgaaattttcacagtggaagagagaataaaagcaactcttgtgggtcaggaagtttctggacctgccgcgccatggccagtgagcccctaggccccacatggccctcctggggaagctgacattggcccggcctcaggcgggcaaaacataaggagcctcctgtcagggcaggccaggcacgggggcatggcctcttttttcctgggagagcagtcacccctctgtcacctgaccagctgcccagtcacttgctgctgcactcacgttcacacagccgtgaactccctagaactgcatctgctcaaactgctgcttgacccctgctttgcatgctttcttctgcctcctgctcacagtcctgtctccctgattctccacatggctccatgtcacccagcagtcctgtgccccactgctgtgcagagaagccagtgatggcccctgcatgatgagagactcctgtgtctacatccttcctccaaggagaagttggctagttctgtggcttggccgggagtgggtttgggtcagcttctgcacagtgtccattttaaggccaatggtcaacatcttgtccaaggtcctcattttgcagcaagagctgggctccccaaggtgggacccttgccattagtagagcctgactcctaagtctccagctcctgccctggtgctgctcccagcatctcacaagaccccactctgtcacgaagaagcagtgaggtcatgatgttcagaagaggaagaaaccacaaaatagcctattctcttgcaagctgctgcacatggaattctaggggctctttgccccttacccagagtggtaggccttgctggaaagcagaattgaaccaccttggaacaggcaatttttagaaatcaatcagatggatcaattcattaaaaaaggtcattcctaaaaatcaaaagcagaaggaaatacatgaaccttactaatgttaactgaaaaaaaaaagcaaagtaagaaaaagtatatgtagtatgctactgtttctctctgaaaagacagatagaaatatatattcctgcttacttatattaacgataatgaatggatgggtaaacataaaaccagtaaagtggttatttatgggacacaggggagttagtagcactagatatctctgaacaccctgttttgcagatctgaccttacaaccatgttaaatgtttcacataattgtaagtagaagttagattgatacaaaaacaaaccttttgctacgcctgagagggcaggcacctgcatgagctaaggcatccagaccggctccttgggtagcagagggtcccccagccttctcaacatcccacggtggggtgtctaatacacttctcaaagttgcatttccaaaaccaagcttccatctgccccaagcctgccccactccctctgtcttccccatctcagacaacacagcttcatccttcttgcagtcgctgaggccagacaccttgcagacattcttgactccagcccttctctccacccgcagtggaccatcagcagttcctgcgggtcccatcttcaaagcagatccaggatctccacctcttactccctctactcctgcccgctgggccaaggcagtgtgggctctcaccgggattactcctataacattactatctttgatctcacctttttcaatgtcatttcttagctcagaaccctccagtggttcccaatttcatccagataagggccaaagtcctttcaatggtctgcaaggccccagatgatctagctctcaccacctctctgacctcaccatctgccctcccccttcacactctgcactcccgccaccctgccttcctgggtgccagaagttccacctcggggactttgcactggctgttccccctccccggattgctcttctcctgggtatttgcatggcttctccctcccctccctcaagccttggctgctccatgtcaccttctcagggaggcctgtcttaaccattccacctaaaaaggcagtctccaccaggggtgcccccaccatacaccagcattcccagttcttccagcttcccacttccgtaggccttcccacgctctggcattctccatggtgcatttgttctgtttatcttctgcatctccccgctgggtgatgagctgagcctggcatgagtaaatgctcactaaaccactgtcgagtaagtgaatgaatggacaagaaggtagccagccctgctcaaaagcacttactttatcctctcagggcctttcagcacctcgcttagggacctgcccagctccttgggctacctcccatcctgcagttcccctcctgagaccagacataagacaccccaggaagtcttagcctcagagtccagatttgaagcagaaggaaaggtcagctcccactgtccaccctgaatagctggtccccctgtctctaagtcttctcccacctcccagggcctgtgacattgcagagatgtgagtgtcctcatctgggtgggagtcattactcttcatactccccatcaccagtgggacagccaagattcctcccggcataggagccttcaggacagagcagagggagttgtggggcagagttagcacaggccacagtgggttattgagggaaactggggtgtcagaaggacagacctaacccccaagctggatgtcaggcaaatgcactcccgtgtcgtggcccatgacgcctttgtgaaggacggaacccctgcctgatgggccactgcggggaggttttcagttggacttgacggcccttcactcacctggtggggtgtggtgggacgggccacagtacaaaccctgctctggccctggctctgcccttgctcactctctggcctgtggacgaacctctctgcctcttcccagtcacttcatctttgaagagactgtcatcaccgccactcacagggcagcagtggagactgagtgagcctgtgctgagggtgctgcacccatactgggtggttagcatttcaaaatggcggcccggcagattggcccttggcggggcccttcccaggggccactggaagctgagaggcctgtggggcacagctctgtcatacattgtggtttcaaagcccacaaattcctttagtaattcctctgctctggaatcataggagggagttgtgctggtagttggaatatttacccgtcggctcctctccctcccgtcttcctccctttccctggatgtctgcctggccatctgcagtggcccaggtgaccttctgcttatgtgctgtggggtctaccaggctattgcatttaataaactcttaagagcatgtctcctgtgtttgaaggactctacaaatatcaatgcacattgtcagtacaaccaccctttaaggtaggtgctattatgttcacatcttacaggtgagagaagtgaggcagagagcagttctgtaacttgcctggggttatacagcaagtcagaggcaaagccagggcctggatgcaggcaggctgccatagagtccaggctcgggcaattccccttctttctctctctgctcagccccttgggacctctcttggcagcctgtgacccagccgtagccctgcccctgaagcccagttctgaccatccagcttccaaactaagagatggccccctgtagccaggttcctgcccttccccctaccatcgacctccagagtcctccaaaacctggcccaacctaactttccagaacctcttcctgcaaccccaccctcactggccatgcacctggtgtctccatcggctgggcctccgtactctctgaccatgcctgggccttccctgctggactgtcctttctccagaaacctcacccaggctgcaagtcccagatctgctcttagcagaatggtcagggtgagactggtgttcctcagtttactctggcagttttatgcctgaggaccaggagcaagaagtattttatatccatcactcaggatgtcctgggctactcaggccttgcccttgtcctgccttgactgtcacctcttcccccaccacgcaccttgttcttttgtgtccccagggagcagagatgctctggctttggaaggagtggactccagctcctgggacctctgcctacccgtggtcaactcattaaaaccattaaaaaaattcctcatgggttctagaaatattacagtgttttatttgtaatatttatctagccctgcatgccccgaccctgccaagtccagaaatatagcatcgtggttaagagtgtaggctctcctcagcttccagctttctagctgtgtgacctggggcaagttacttcacttctttatgcctgtttcatcagctataaaatgaggacaataatgccactgtctaccccatagaattgtggtgatgattgaataagcacatttgtgttcttagaatagtgccttggacagagaaagcaccatgcacgtcattcattatcatggtggttgttgttattattgttagagaagagaactggggcccagagaggtgtttcctctaagccagtgtcacacagctaacagccacaggttggagtggagccagcagcctgcctctccagccagggtctgctctttactctgcccccgccccccctccttggtacatgttgccaggcagtgggtactccgtgagcttaaaatacccaggtgctaccctaccccaccctgtgtcctgccagctctgccagcactgacctggcccactccatcagccaagtgaccagggcttttttttttttttttttttgaggcggagtcttgttctgtcatccaggcttggagtgcagtgttgcagtctcggctcactgcaacctccgccccccaggttcaagtattcttctgcctcagcctcctgaagagctgggattacaggcatataccaccatgcctggctaatttttttgtatttttagtagggatgagattttgccatgttggccaggctggtctcaaactcctgacctcaggtgatcctcctgccttggcctcccaacctgctgggattacaggtatgaaccaccatgcccggccgaccaaggccatctttaagaggcctggctcagtttcccacccaaaagaagtggacttatggggctgagagcctcccactctgctgtcctctcgtcatcttcatcttcccttgggccacactcagcacaagaagggagcacagggcgcctcccggggaacagagagccagcgagtgccactgggaccaagggcttgacacctgcctccttgtcccccagctcagaaaccacttaccagggctcctgacccacagcaaaaatctaaacattcatttccagtggagctcaataccatctgcagaaagccaggcaggggcagaagaacaggatgtggtccctgcctgcctccagggatgagctgtggacataggccataaacaaggagacatttactctcaacactaggaaaaggtcctgggacagacagggcttttctcatgggccagggtgaccaggaccgtttcccgaaggagacaacacacgagctcctcaagaaccaagagaagatgtgttgaggcaaagatgagtggggtgggagttcctgcaggggaatggcgtgggtgctcataggggaaaagaaaggagcagggcaggttacagcacagtgtgcagggtgccccgggattcttctcaagtcttgaggctccccagagggcaagcagaggaatccaaacccttgtggatgctccccaaaggggctgcagacccgcctctaagaggctgaacctgccacaggaaccgtagcaatgccagaggaggcaccttctgcattcgggcctccttggttcacacgcagacagcgagagcaccatgcccagagtcctgacttatcactgctgccatttcccgagtgagtgatgacagcagcagcgggatcaacttattgagccttgctctgtgtcagagccaaggcgcagctcatttaaccctcagaagccagtgcaatagactttatcatcattatttcacaaatggagaaactgaggcatggacagtaagcaccttgcccaggggcccatgctagaaagtaactgggtccagagtctgtctgggtccagtgtctggctctccctgcttctgccaggggtattggggtgttttttcatctttaaacagtgcagtgtgagtccttgcctatggtcatggggtgagcatcggggcttcacggagatgggagcagcacacccaggacttggcccctccaccagtctatcactcagcagcccagagagccactctggtggttttgcccattacacattttaaattatttttattcttagtcaaatatttaattttttacccataatggacagttggttaaaggcaggaagcattaaagaacactgatattaaaaggctggttcatgaggaacacgtaagtggtaataattctgcacatatgcctcagggtgctctggccggatctgcaagcctcattcatctggtcagagttctcgtgtggcagctcctgcagcttgcagagcttcacaaccccgggctggaggcagacagagcccaacacccatctgactctgtgtccacacggagccaaggccctcctcactcacgtcgtgcaatttggacagaagcacttcctaaaaactctcgggtctcagcatttagaaacaaagcaagaatattacaaaatcaaaccagttgactttcatttttttagaaaaacataaaattcaagaattccaaacagcgggccatgaaatcagtttttgctttttgtttctttttatgccttatatagtcaaactttagcctgcagtttagtgtgtactgatgccaaagccacagtgtaatggtaatatgtcattttgaaatttctttgtagaaaatcatgcttttgcttttacaactcgtttacaataaatgaagaagaatgcatcacttgataattggcagaaggctaaattttgcctgtattcataaatgttattaaagatcgggttaaacacaaaccttgtaattcacttccaataacatatcaatctaaaaactgtatttgacgtaaaataacttctttatctggtagtaccaaaaataacaattttttttttaacacttaagagtgtttccaagagaaaatattatggtgagaggaattctcaaatcccaaagagtcaagcaagattcagctgtggcagccctctaaactgccccagttttcatgaaggtaaaaataagaataatgagaattcatccttttccctcccgttgaggggctaagtctcctggtaagtgccttataggcccacccctgagaggaggggcgtactttgagaaatttgaccacaagtgctttccagaaggtcaaactgacttgcttatggtgagtgctggtacacaggccctcccaagttccccaagatgtgggagggtttggccacccttcagactgtgcccagacactcaagttccattagggattctattggttccaagtacacagatgcacaatgagctctgtgttcaaccctggtagcgccatcctacggtgaggggtctctgcagtttcacctcctgctaggtgcagcaggacccccttgtgtcaattttattgtatttcatttggtttgcctggtgcgtaagaaattgacttaagaaaaattgccaccaagcctttgttgagattggcatttcttctcgaatggcctcttccctcctcccttttaactaaatcctgcttatttttaaaaacttttgattctgacaaaatttcagactctcagaaaagttgcaggaatagtacaaagaattcttatatatccatcacccagtttcctgtgatgttaacattttatccttctctctctcgtatacatttttttctgacccgtctgaaagtaagttgccaaaatgatgcccttttactgctaaatatttcacagtgtgtttctttaaaacaaagactttttttcataaccacaatacaattctcaaaatcaggaaactgatatagatacgatactgtaattgagtctgtagaccttattcatatttctccagcgatcgatcctagactgtgggctgcattcgattgtcatgacttgttagtatcttttatcctggggcagttctttcttcttctttttttttttttcttttgaggtggagtctcacgctgttgcccaggctggagtgcagtggcgcaatcttggctcactgcaagctccgcctcccggattcatgccattctcctgcctcagccttcccagcagctgggactataggtgcacaccaccacacccggctaattttttgtatttttagtagagacagggtttcaccgtgttagctaggatggtctcgatctcctgaccatgtgatccgcctgcctcggcctcccaaagtgctgggattacaggcatgagccactgtgcccagccaacctggggcagttcttaagtctctgtatttcatgacattggcctttttttaaagagtgaccagttatttttgtagaaggtccctcagcgtcggtttctctggcatttcttcatgattggacttgggttataggcactgtagtgatgtgaccttcccagtgcaccatgtcaggaggtacgtgctgttctttaatcccctgcctggtgatgttaactatgattacctggcaaaggtggtgactgccaagtttctccactgtaaagttacaagttttccctttgtaattaagaaatatctttggggagatatttagaggctacgccaatgttctgtttttcttcaaaactttcatccactgacttccattgatgattcttgcttgaaacaattgttcttatggtggttgccaaatgattttctaattccatcattccttctaaatgtactagttgtcttttatcataagggaaagcctttcattgacttttaactcactgctctaagcctcaggacctcagcatttgggaactaggagagcaggtccttgtcccagaatacacgggctgtctcctagctgagtggtgtttaatgtgaaggttatcagcgtcctgctacaagtcccttgtattttggaaggttctagacaaagaaactatctgctggggagccatgtcccaagatggctgggctgggggttccactatgcatgaagccttgaggagtcctctctgtgataacgtctcaccatggccccatcagttccaccagccctggctcaaaaacgtggcccaggggaggccctactccagctaactccgtttcacatttcctctccttcccaggatggaaaaacagcccttcagggacaagcgaacctgtcagtaattaagtcatgagtggaggaggcagtcccagaagggtggctgggctgtgaggcctaatggagtgaggcggctggcggcgttctccgccaagagcctggaggctccacagcccaggaagcccaaccggctcctctgtgtcccatctgtggggccatctttgcttcacgtaggggcctttccccaagaagggctggacaaggtttatcatcatcctgtggtcagcacttttagcttgggctgttacctgttttccagcccccaggcacacccatgacacctgcctgctctcagaggtgccccaggctccacactttccctcttgaaaagtgtctctcttgtgctgccctcctctgagatgcttatgtttgggacaccagggtcacagcttgctggcctgatgaagtactccgtgcatactgattgaagtgagaacgtgtggggagggtcttgatggatggggaagatcaggcgcagggacaagcagatgcggcactatgatggtggcaccacctctctagctcttgcctggtagacaggaggtccaggctggccaggaggagtcaggaattaggtgagagggagcattgtcaccaaaggtttcaggtcagagcgtggcaagatgatagtcacggccacatagcaggatggaggggagaggcctcagtgtggcatggtctcttcatccagaaacagagactttgaaggtctgggtcaaaaatgccaagtccagccccctggcccctgacccaggagggagctgagttcccctgcagtcttagggggatcctcccatccccactacttctctgtctccatcccacctgcaaccactgctggtgtctctactcttctcctttttaagggtattcctctcagttatgtgggtccttccactacctcacgtcctccaggaagccctccctaacctcaccccgagaactcaccagaccccatgtctcgccacatgctgtcgtagatggttctttgagtagacatagcaattttgccgctagattttaagatccccaagggcgggaaccatatgttatgttgctttgtggctacctgagccccgacacgtaacaaatacaccagagtttgatcagattttaggattgcaaaggaagactccaaagctggtatgtggctctacccagatctcaggggagaggccagcctgagaagcaatattcttcattcgttagctcaaacgtggttttcaatgaatcaagaataaactatgatggatgaggaagccaccatcggccagcttgccaactggtgctgagcctccagcgccccatcttctgccccagcaagctccccagtaggttcctggctaagaaacttgggaaaccccagtaggcaggcttgcatggagggcctgtagccagaagtagagaggtacgctgggcaggggaagggcctgcactggagccaacagggtggcggcccacatgcagctcaggccactgaggcatgttcattgtcctagggaagctcccgacaacttggagtcctggggtcactactcagtttcatgcccaggccttgaagtgaaacacttcattcagaaagtttaggagaagagaaattggcttgttcaagaggattttgctaccaggggctgcggctcacgcttgtaatcccagcgctctgagaggccaaggtagaaggattgcttcagcccaggagttcaagaccagcatgggcaacatagcaaaactcctgtctctacaaaaatttaaaaaaaaaaaaaaaattagccagtcatgatgtcacgagcctgtagtcctcgctacttgggacgctgaggtgggaggatcacctgagccctggaggtcaaggttgcatgaactgtgatcatgccactgcactccagcctgggtaacagagcaaaaaccaaaaccctgactctaagaaataataataattattattattattatttaacaaaaaaaaggaggtttttgtcatcagctgcaagtcacccccattgacggccaaagtaatggagaaagcagccctttccaccagtcccaagatggactttgacgaattaaaatgcccaatcctttgcattttctcagctattcctactagattattttaaatagcagtgaggaagttcttctagaagagcgcagatgggtcagtctcttggagtgaagagcataggggcgagacgggggttcgggccctggtcctggatgggctttctgctcaacctctcccaagggggaaaggctcccctagggttgctgtgaggatcaagggtgagcatgtgtgcccccagcaggtgggggccactcagtgtttgttaaatctgagtaccatggtgacttgggatgaagggagggagggaaggagggagggataatgatggtgctaaattgagtatcactatacctttactccaccttcactccagccctgagagtggaaggaaagccagaagcctagaggtgtgggacagcatgggataatggaggcaggcccattccctgggaaggcacctcccgaagatcagcgcaccccatcctcacagctaccatgtgcatagctgttgtgaggtccgtttgattgataagataacagaggggcagagaagttaagtgacttgtccaagaccacccagctagaccaaggcaaaaccagcatatgaacccaagggtgtccagctttcaagtttttaccacatcaggctttctctccagatgagaacttcttagagggctgctgaggtccaggagggcttcctggatgaggtgctggttgcagaatgggcaacagctaactagtgaggtatagggcactgcagtttctaactgttggtcagtgatcagacacctcccatgacaggaagctcaccatgtccccagacagacccctctgttgcggggcagccctccccatgagaaagttccttcattaagtgagcccaggctgcatctctgcatctctgagccttccctccactggccccttctccccagccctcttttattagacaggctccatgattggtcgcacctgggattttaaataacttttaggcgactttctgtccatgtgccttcctcttggtcctagcttttctagtttaagggctgttccaccacaccaaggtggtaagattaaaacaggcaaggaaagagtgacttccgggagagcaacttccaggtcaatcaactcgtagggtgagtgagacagcagagggccagctaaggcccatcagccagggtgccgaggccagctgtggtggattcgaatggccaggctttgggctggggataaaggaagtcactgaaggtggaccccaagctgcgaggaccccatcacagtatttccctcgggatgatggtagtgaatgttgggtgatgaagactttcatggtgggaaactatgcccaaagctcagcccttagagcccaaaatcagaacagaagccaggcatcctgaggtctcttccttgacctaacatttgaaacagcccctgtcttcccatctgtactatgggtgcacagtgtgatccctccctctgcatagctggaggattcatgctctgttgcttggaaaacccatggcataataatattacaaacaaacactaatatagcacttgtatcaagtcctttaaaactcacaagaaccctatgagatgggtgttctatttgttcccattttataggggaagaagctaaggcacagagcagttaaggaacttgcccaaagttgcacagctaaaagtgtagcgtcaggatttgaactctggggatctggctccaaagtccacacttcaaactaccacgaactactgtgaagctcgggggatgcccagagccaccagcaggctgtagtgagggtccatgggccggatctgggagactgcagggcttggcaggccgagcggaagggcgagggccttcccctggaaacactccaccaggttcacgcggagcctggcgactccccagggcagccgcgtgctcttcccatgacatcacactgcctcagaacttttgaggctgaggattcttggaatgctggattcaccctggaacaaaaataatacctcgtattcataacgtgcttttgttccccacaggctttcctgggcttcatttcattgtagcctcagactagccttgtgatccaggcaggagtcctgtaggtgggaggccaccctaagaacctgagtcggggttggtctccccattctgcaggtgggcatactgagccacggggagttgagtggttggccaaagctgcacagcaaactggttctgggcaatgtgggccaagagccctggatttccagtggggttgaggggaggcctcagaaatgggtccgcagttgagtgaagctcagaaccccatagagtatccccaagaaagcctttttcccttggccttctgtgctgccgcaagatggaggaaggtggcaggagtctgcacgctttcctcccttccccacgaggcagcaatgaagccagaggggccacccgaaaaacaatccccgagccctgccccacaggccccagccacaggaaccagcagactgtggtgggaaagggctgttcccagcacagatggaaaccaagggctgcagtggcttctgtggttttcccgagacgcagtggagccaaggctggctggccggatctccaaccctcccatccagagccctcccaggctctcccctcaccagccccggcctccccattcccagcgggccctggctcagccctccgcctttgcttctgcaccacacgctgccataggacagcccacagctccctccttgctgactttggctgaggcctgtggtcctctgaatttgggtttagtggctcagcaatggtgtgcaagctgccctacactctcagaacactcagtgtggtggctgagggcacacattcggggccaaactatataagttcaaacccaggctctgcttggtgcaagttgtgtgtccttgggcaagtttcttaccctttctgtgccttgaagacctctctggaaaatggagtgaacaatagttcctctcttggggttgaacgaaagccatgcctggcttactgtaactgcttcctacatgctagctatgaaccattcttctgcatccctgtgatgtgagtttgagtcctgtggcctcaggaccaccctcagagtgtgtgaactgcccgagtccagggcctgcgtttggtttatgctccaatatggctgtcttgactttctcaatagcttttgaaccaggggcccacattttcatcttgcactgggttccgctcattatgtggccagtcctgcctccaggccagagtagaacataggcctgtgctgctctctgcttcctttccttcgtgattcttgtcctgggataaagctagagacctgtttctgtaactaatagattcacatctgtctctccaaatggaccctcagcttcatgaaggcagcagccctgtgcgctggagtcatcgctacctcccctccccagaccacaaggaagatagagagaaggttctgcctcatctgaaggaagtggatgctttgggagcagttcagaggcacacacaagacactctggtggcagagacgtgggtgtgatgtagggcattccagactgtaatcatatcaggagtctggagggctcgggcaggaccctgggagctggggaaggctcctgctcaggtctggaccttaagacctggataggattaggggagtgctgaaggactctgtagggacagctgaacagctttgtcacacaaacaccctgcctccaccccaacttctctcagagggctgcaggagctatgtggcctcaggcaaacccactgacatctctgattaacctctgggcagaacagagtctcagcatgtgtttaattaatgaaacaataatgaaccagcctttctctgcatcatttattattcattcattcattcattcattcattcattcattcattctacagttagtgagaaaagtctttgcctgtagggtgcagaggtaccaatcagacctttcatctattccagagcatcgtttggcgaggtaaacatctgatttctaaagcttttagtccatgcagtgagctaccacacttcttacatgaacttttgcctaggctggcaaagacctcaatcttgaattgttttctacccaactctgagcaaagagagccacaaaatctattggagtgggagagtctgcagcttggctggccgcccacggtggcaggagtgtttctgatgcatgctggccctctcctctcagcgttgttaggagggagtgctcaggaagtagctggcccagtgctgctgttgccgccatcatgataatgatggctctggcaattacagggcccgtgtgttgcctaagctttgtagcgatgcccccagttctccaaagagcactgagatctccaataagtaattgttaaatccagtcatatggcgtgttacagcaaaaacacaaatctgagttccagtgagggctttgccactaactagcggggcgaccctagaaggacaaagcaacctctctggaccttggttttctcatccgtcatgctgtgactcatgtaatccttacaactgcccctcaggtggggactggcacatctggaaacagagacacagagaggtgagatcacccagcccatgcaactgtgagtggcacagtgccaggctctgtgcaggctgccataccccagacagacctggcaaggagtgtcctgcgggggacacccatcatccgaatcagccctgcgcgcaccatgggtgctccgttagtataggtcactgtgatccttgtctctgagtgttcatcagccaataccatgatgtcccttggttgactccctcatgagggaagaaaacctcccctcccttatacttttcctttttaagcttccccatcattctgcaaactggggtgggtgtgtgtggcgacttttgttcctgggtcctatatgccatcgctcgactaagcagcccctgagctgcagagaaattgctggtgcctgtgcctccgagcctcaccgcaacccttgcgttgtcccaggtgactgggccagggcaggcagagctcactcagggcatgtgtaggtgggcaggagtggaggtgcctacgctggtaataagcagtcatcacttttcctgaaggcaagaaatatgagcccatgcatagttttaaaaccacttgccctaggaattttgctttcagaaatttttaagcagacctacaaattatgtggtaaaatgtccgacatggagagaaccataataagtcagtggcactcagaatatctagttgggaacgattatgaaataaaaaacgaacagagggacatttgtctccatttggactgctgttaaaaccatttttttaaacaaaatttgaagttattctccctacacccacctcccaaaatgcagctgtggtgttccgagaacatttttgtctttttgtataaaagagagcagtcttagagtaaaacaagacatctgatttcagaacccaaagaataaagaataaactaaatgaacgatggaaaaagcataaaccgacaatttccattctccaaaaaaaaaaagcattattttcctaacagcaggtgttgccagtagcacaaatggaatattaatcttatctcctgtgctgttcttcctcacccgaagaagacttccccagaaataaagaggcagagagttgggtttttgcccttcttacttgcagggctgcaaaactgggtgtccagtatgtttcccaacccaggacccacatgtccatgtgtctgagaccaagtgcagcctccttgccgggttgctgggagcaaaagcggctcatccctggcccagccaaaccccaaacccgcaggtttcgtggggagcagccagctggcccctgaatgaaggtatcgacgaaacccagcgccagcaaatacagaagagagaggagctggttttggctggcccagccaacgaccgctgacaaatatttgtgaatggccagagcagggaagcctaggtctccattgctggggaacgaggcctaactccaagtctgttccagtgcccttagcagccctcttggctccttctcaggcaaagaatttggacctcatgcagttatcaccaccgaggtctcagtggccattcagccctttgtctccattactacaggtcactgcggtccttgtccctgagtgttcatcagccaaggaggctgtgtctaaaggcgaatgggagacagatgggaggtggctgcaaggtgctgtgattagttgacaggcttagctcactcctggagcccctggcaggccctctgctgtaggagtgcacctcacggagcctcggttgtcttatctgtcgaatggaaagaaaggttcttggcctgcctgcacacagaggccagtcccagcaatcactcaccctgagaactaagcaaggccttgtgcaggaagaaggaaaagggaggacagagggacagtcttagtgcctcttcctccagtggcatctgggttcttccctgccctcccagggctcacccagctgattccatctgccatttagctccatatcaagacctccttattttgaacctgttagtctttcctacccaattaggagggaacacttgaggtggactccctggcttccctcccacctacggatggctttccacatgtgcaaaggagccgccgcccagcaagggtgagcctgagaacgcccactaatgccaagtggcctggggcattcttggccattgccatattgtcagggctggctggctccaagctctttcgaaccaggaagacatggaattccaggtccctccagatttccaggaatgaacagcagaagccctgcaggagccagctgatttctttctggagcccctgaccactagccatatagcaattacttccttccccctccaggtagatagaagttgttttcttttctgggggtggaggagtgcactgggtagagagagggaaatccctgtatggcaagtgggaaaccaggcagtttcaagacggatgttgggaagggcttggtcaaccatcctttggggacatttcttgggccatagctgcaggcgccacaaaaattctaaataaggatgacgaaagttgtgagaatcaattattatctgccagggaatttccaaggttcctctctgggcttaaaaataactcacattgaaagaacaaagagaatggaaggagcaattagttgaaagtaactgagaagttaaaggagggagaattcacaaaaagtcacaggcacgaggcaccctggagagtggtctgtgggccacagtttcttctgggctttccaatgggggttgccttacactctgcagaatgagggctgcagccctccccgctgactcaggcatttggggctgggctgggctgggtagtcggaaggccagttggtggtagaatcactgggaggaacctgactcaagggccccacttttctcatggggcccaactcttctccaggtgctggtgctgatagctcctacctgccatggggagtgaaactgaatatttcagcaatgccagtgaggaggggggtgtgtttgggaatggaggggctgcctctcccacccaagtgtcaaggcaacagtgcttttgcccaggaatgtatatcagaaaccaacaagattgaacttggacaccaaggatgaaaaatgccacacaggcctcctgagaagggcccagggtatgcctagtcagcaggattcagttcagggtaccagatttttacagatattttaataatgactcttaaattattgaaataaatatagacaaccccaaaccttggacactgtatataaaaagaaacctaagaagactctgaaaggtagaaagaagacagacaggccagggaccttgggaactgaagaatgacacactggtgagttcctggggttttcctcttggctcagatatcccagacttggagctaaagaaactggagacccagaaacaccatgaggcctgagcagacaaacggagccccaacaaaagtccactctttctagccagaggaccagggaaggggcagcctagcaagacagaaaactcgagacagtagctactttcctccagccaaacacctctgcaggaactgtagccacacccccacccaccactccagcggaggcccaatgaggggcctagacagtgacaaggtacccagcaccccaacagggtggtgtcaaagggactgtcatccccattggggataatgagctactaagcttttcaatggaggcttttcagtgaaaaaaaaaattttattcattttagtggaaaaaaataatgcatttaaccccaacccaggataccctcaatttttcacagataaaaatgtatcaagtaaatattaaaattgaatttatataagtaataagcaataagttgtaagtaaataaatacaatttgttcataacatgcaatgcaatgaaggtctgtggtacccaagataggtcacggaggaggtgcagcgcttattctttagaagctaacattatctttctgcaaaatctttccactattttacaacctttgcggaattcatgcttatcttgtgctccaactgcacttccagtaaagttgtggcatggaaaacaccctgagggtaaaatggagtttgaacatagtagtgctttcagtggcaggaagcagcctttgagccagccagaagggtcatgagaatgtccctcaccaccccttcacttgccttttggccacaactcaaaagtttggggtttgttcctgctgcacaactcacacctgttccctgtgcttagaaagtgttgtcagatgagcctgtcttgacctacacccatcatgttaaatattccttctgtatctgtttgctaggttgctgtaacagagtaccactgactgggctgcataaacaagaggcattttattttctgacacttctggaggctggaagtccaagatgaaggtgtcggtggggttggtttcttctgaggcctgtctccttggtttgcagatggtcaccttcttgctgtgtctccatgtggtctttcttctgggcatgcagcctccctggtgtctctgtgtgtcaaaggttcctcttgttataaggccattagtcagttcagattagggcccatcctaacagcctcgtttaatttaatcacctctttaaaggtgatccatcatgtcttatctccaaatacagtcacattctgaagtattgggggttaaggcttcaacatatgaagttttgcggggtggatgggggacacaatttagcccatgaaaacttgttatagcatatgtagtttgtgggtttgggggtgaaaatgacaatgttccaaaaaaaaaaaagttgtttgaaagggatataacttttcaaaaaacattatggtgaacagtcattcataggaaggtgcttgtaagaagcaggtctgcgtatgcatctttgctggtacatgcatagaatatgtctggaagattcacacacgtggaacggctgcttccaaaggccatatgtgatgacagagtcagaggcaggagggttcactgttatctgctactggatctttttaattttgttccacatgcttgcattcacacatattctagtaagcgaataaagtactgattttaaggaaagaattggctttggtcctctgcagtagcaaggaccggtctgcctgttctcggctgtatccccaggggctgtcacagactctggcacgtagaaggtgctcaggaagtgtttgttggaagaatgaatatatggacaaggcaatgacttcctgttctggcggctgggcacagggactctgaccagcccgcccagtgatcgccttctctgtctttcctcttccgtttgcaggcggcagcagagacctccggggggcaacaagccccaacagcatggtgaccaccagccaggcagtgccaaacacaacagggaccaccagaaatcctaccaggggggctcagcaccccacccctcagggaggcccactcaccatggctacagccagaaccggcgctggcaccatggcaacatgaagcacccaccaggcgacaagggggaggcaggcgcacaccgcaatgccaaagagaccatgaccatcgagaacccaaaactggaggacactgcaggggacaccgggcacagcagccttgaggccccccgcagccctgacaccctggccccggtggcttctgagcggctgcccccacagcagtcaggggggccagaggttgagacaaaacgtaaagacagtattcttcccgagcgcatcggggagcggcccaaaattaccctgctccagtcttccaaagacagactgcggcgaaggctaaaggaaaaggtaccggtaattgaatttttgttcttctcttgcaccagggaggacagcaagaggtaggcacttcggtaggtgggcacagtgcagagccttgtgggtttgagggtctagggagccatgtacagggaagcaggggcttcggtcactgtggggaccaaccacactggtccaccactgccagcaggtagggccatcatgaacccctccagcacacttgggcttttcaccttccaaactccaagaggcccagggtgggcacttggaaccagcccccagcccaagggagtagggggaagagatgcatgcctgggagtgatgggggaggtgcagggagcatattctagggttagatattgtttgtgctgaagagcacttggggaaacatggagcttatgaaataagaactgaagcttttctacaggtgagtaccatccaggcagtggtctctgccagaatggggagcagaggtgagttgttcagagtgggggcaggctgattccagccttcctgtttcccgccttcatcacccagaggccagggagtgctctacagtgcacaccgtaaggtggctccattctcagcatcacgcaggtgcctacctgtgccagcatgaacccgagagtgaggcctccttacttttgctcccaggaggctctttctgcaccctggtcctggcctggcctgtagcttcaggagatgaccctaaacctccagaagagggatggggatttgtacttgcagcagtaagtccattgtgctcaccccagtgccaccacccccgaccccactgcccagcaggggcacaggaaaggtcaccctggagaggaactgtcccaagaaaggccaacttgcccacagccattcccacacagcagcagggcctacagaggcttcctcctggggcttccgcagagctccatgttctgggcttctcctccatcctcccctactgccgactctcctcaagctcttgccccagaggccaggcccagggtccacactcaggcaggataaggcaggtcagacctcttcttggatccactcttgaagatgagatgctgctcccagtatcctctccaccgagtcctctagagttctgctaaatgtaactgcagggcagcagagtggaaacagcacgggctttagagcgcagctgagcaggctcagacctcactttgcctttgactggatgggtggtcttgggcaagtcacctaatctccctgagccccagttactcatctgtaaaatgggtgttaatactacacaccttgctgagagactgtgaaggttaaatgaaataacgtgtacagatatgttcttgtgggtattcctattctatatgcagaccactgttcctgccctggggcccagatggtcggaagagaggggtacatgggggaatggaacagagaaggtagatctatagcacctatagatcagtttcaaggactccactcaggtgaggcctcctgaactcctggaccaagaagacatgggctcaggctcaggctgggtcactccccactctgctagttgctcactctaaaaaagggtaaatcctaggtggccaaccagccacatcctaaacattttcatcagggagagcaacactttccttctctctttcaagagacaggtaaagcgtgagatgtctcttggggtggggatttgtgtcctgttaactttacccagggactcagagtagccttccctgaagaggtggttgggtttgaggagaagaactaggccaccctattccttcacccaggattcagccctttcttttttttttttttttttttgagatggagtctcgctctgtcacccaggctggagtgcagtggcccaatctcggctcactgcaagctccgcctcccgggttcatgccattctcctgcctcagcctcctgagtgtttggttctcaagccagagactagctgcccttggaacttgatcccaccatggaagggctcaaggaaagctatagattttctcgtctaacctcactgtgttacctatgaggaaactgaggcccagagagtgaaatcacttacccaaagccacacagctagaggcagagagtgggatctagagccttggtctgtgccttctaggccagagcttctattgtcagggacagaagaccaagcttggatctcatttcatgaccctgaccctgcccttccagccagatctcacttccttgcagttaagttgttcccattcttggccaccaagaatgagtcaatacaataagatgacatttttttcttcttcaagcccctggtctggtcctagttgcagtgaaatctcataaggctgtagggctttttacttgtaatatccctcctagaagcccaactgttttagtggcacatgggaggattccttggtgtgtggcatatgtctacagaagaccagcacagtctccacaggacaaaaagccagggctgtgcccacagggggccctatgcccagagaacaagtcatcattgggcatttggagctgagggtgtaggggacaaggtggccactgcctgggccgcttttaaccaccactgcaggcattttggatctgacctgccttcctgaccaagtcttcctaccctcattttctctttggcccgatttcatatttgttatcttatttcctctttcataatttccattaaatcttttctagattaagatatttgatggacaaataaacaaaaaaagccaatgtatatgagaatcctgggtaggagctagaacccaaaaacagtatcagccctggatgtcataggggccaagaaaaaaggcaacaaggagcttttggcgcatgaggggtctttggtggaggttcccagagggaccagccctcagatccagggaagtaggcctggtcctgctttctgggggtggccaccctctttccaccaggccacccctgcacagagacctcggcttcactcaggcacattcatttgtctccgacacccccaggatgaagtggccgtggagacgaccactccccagcagaacaagatggacaagctgatcgagatcctgaacagcatgcggaacaacagcagcgacgtggacaccaagctcaccaccttcatggaggaggcccagaactccaccaactccgaggagatgctgggcgagatcgtgcgcacaatctaccagaaggctgtgtccgaccgcagcttcgccttcaccgctgccaagctctgcgacaagatggcgctctttatggtggaggggaccaagttccggagcctgctcctcaacatgctgcaggtaactggacgccggccaccaccgccccgcgccccctgcccctctgcgttcggtgagttattcctagcgagaaggctgcgagttctggccacagttggacttttcccaagttccgcccttgcccgattaattatagaaaacacaaaggcagttaaggggccaggaatgagcggctggatttgtgtgtgtttatgtgtgggctccctggttacaatggaccaatataattttataggtgctttatgtttaaccagcctttcccactttctattttcataagaggctggctcttggtctcaacctggctatgtgctttgacctctctacatccaagcagacatgaacttgctgtggacttctcttttcctcctccttccacccagggctaggtccttagacctttgcagatatgcagttgatcatcactggtagtgagatgggtttgagtaaagccacacatgagcagaaaagggatagtctgtttaccaacacactatggctcctgggcagagggaagtcacggtgatgcaagactgtcttcatccttgctctttccctcttaatatcccttcacctctgacagtgtaaccccacccctgatcattgcttcctccatgaaggcccacgtccagtggttctatcagcatgagtgtgtcgtgggagtaggcgcgtgcacttggacggagcttagcaatgtttcatctcacaagtacctgcttgcctgtatgggcagtagcagatgagctggtggccccaaaactggtgacgtcagggagagatagcagggtcatgggatggtggccacatcaggtcctgggactgtccttggagactcttggctgggggagagccatgtctcctttcctcctattttgtattttagagactagttaagatacaaagtgagtttctggtccagatgagataaaatggtagtttccaagtaatgaagtagaatggcaggctatagggccatcttaactagggtgaccatacaatagatcatccaaactgcaacacttgtgaaagtcaaagggggttcagttcataattatgcctagacaacaggtgtaaacaagggcatatggccaccctcaccttaaccatgtggttcgcagtctgccgtcttccctaaaagctgggaggaagttgccgctaaggccacctctacatgcagccggcagggctccatccccacccaccctctcctctgcatgtgagttgcactcactgcaacatgagccctccctggccagcctgggctgcttctctcctgctccaggccctgatcaggttcccattcctggatcgcccgcactcccctggtgacgaattcccgcattacctgagggatttgcacatggggcatgttcctcgcgggccggaatgtcctgggagcgtgtggagagtggcgggcagagaagcctgtctgccagagagcacccggcacaggggagtcagggacagcatcagcctatggtctcggctttgggttttgtttttcaaaaaagggccaggatggggcaagagttctagacagtggttgccagctccaagtaacccagccagacccggtggcagacaggcacccagggcatggggcacttggggagggcagctggctgcaggggccatctcagatcgggtatttcttccaacctgccgtggtaagggtggcctcacccacaagtgtccagcggaccatcaatcctggggaacagtcagccacaaagggggccctatggcccctgcactcacctctcaatcaaccacaacgtgcactggtttaggacaggctccagatgtcccagcaggaagggaacctgtttggctccgtttaactcaacaaagtcctctgcattccccagttaagaactacttgtgggattagtgtgctgagagacagtttggcaaacactacagcagggaagaaaacacaaaattgaaagctgggaagcaaggattccagacctgattcgtttgtcatccgttggagcttggcctctatagttccctgggaaagtgcaagcaacagccttcatcagtgtaccctcgattttgcactactggagatgagccggggtctcgggcaggggcacgagggaccccgtgtgagcctttccctttctcatgctcctgaggccttgccactagtaggaaactgtcctgggtccccctgagtcctcacaaacccactcaccccatatagtggctccatagtaggtctgtcatgagtgatgcaggctttgggaccagcccaagagacctagttctgcaggtgccaccttgtctctggagcagagaactggcactccacatcctgctccccaccccccatcagccaggctgaacctcccagtacaccctgcatggacgaactctcccccagaattcacttctctgtcccactctgagcatgcacctccccctgaagcatctcacactcctacttcaggtggtgctagggccccactttccaggaaacactggcccttctcctgtcccagcacctctcatcctgcagccacaatgttcagtcaccctcctagtattcactgagtatttctagtgtgccaggcaccagcctggggactgaggatacagcagtcagtcactgggcacagctttgtccttaaaaggtttgcagtgaaggagttgaacttaaaccaatggccacatgaatccacagtgacaaactggggtgcgtgccgttactgccccccatcttgggctctgggaggtgggaacccctctactttctgcacctctgtatcccaggggctgcatagtgcctggtgctggagggccctcggtcgtcaaggagaaatggatgtctgaaaaggaaggcgctggaagcctcccttctcccgggctaggggcctgcagggacagctgaagtccagggcaagaagggaaccccccacccaaggcagtcatggctcacattctgaggtttcagagcagctcctcctctcctcccccacagtggaggaagccagccatttgcctgggtggagtatctgcgggtcaggtctttagaaatctaaatgtccacataggccaccactcacccctgtttaccacctgcagtcccagctttcatgtgagccgaggagggagccccttgagagtataaccagaggcttgatctgcgttctcagacctcctgggtggctagacaaggccctttcagctgccatgggaaggcgggtggactgtgctggtgcggggctgccctgatcccacaatggccccctgactccaaggcccagaggacacctgaaccacatctggctgagcctcctcaggccctgtgccttctctctgcagccaaggagacagaggtggagtgggcttttctggacagcataattcatggcccctcaccacccaaacccgagaggtgcaagaaaagaaagcgatgggctgggctcagcaaaacctgctttccctcttaacacctccagggatgtcttttttcacctgacttcattttctggcaaactatgtttgcatcccttcctggcaggcagttctagacccggcctgcacagccctgccccctgcttcctccctgaggtttgcactcagctccatccactcaaggcccatctggctctcggtccccaaccagcacctggttgggtttggcagcctccgagatgcccccataggatcaggttcagctaccacttccacacacaagttctgggccccggcttagcaatgcaggctacaaaggggccagggtgtgaagtgcctccttagcacagctcccagcagtggtctttacacttggttctccctggctgacttctcttgctgccagggcttcagtgatgggagccggcagcatggagggagaggggcaaccgcagatgtggtaaacattctgcggcagaggtctgagggctcttgccaagctggggtgcagcccccatggagtgggaagtgcagggtgggagaagggagaaggtttaaggtcctttaacccttcccagccagactcaacactgctatctcaaggaacccagaagcaccattctcatgagccatgacagtgctggagaccttggggtctcagaggaccccgtcaccaatcccacagctccaaaatggtcttcagtttttacatccaagccaattcctttttacctgaaatgtggcccttttattagtagtgtccttgtaagtaaaattctatttattaaacagacatttctttttttttttactttttattttattttattttttaatcattttttcttttttttatatactttaagttttagggtacatgtgcacaacatgcaggttagttacatatgtatacatgtgccatgttggtgtgctgcacccattaactcgtcatttaacattaggtatatctcctaatgctatccctcccccctccccccaccccacaacaaaacagacatttcttaatgtgccaagcatgttgtctttattaggtcaggggttctcaaaccggaatgtgcatatgaatcacgtgggattttgtttaaatgcagattctgatgcaagaggcctgggatgggcttgagattctgcgtttcaaacatgctcctggtagatgctagtgctctagtccagggaccacagtgggaagtcacaaggcattgaatgactgatggtttgtaggtggtggctctgtttcatagatgggcaaactaaggcacagtctgtcatcagtgtgatggtcagagtggaggtctggcctgggaatattgcatttcagatactggctcttctttaggtcagtggttctcagcctcgctatgcatgagaatcatgagaacacagcaggcagggggcctacccctaatcagttgaattagattctccaaggacgcaacctgggcattcgttagccagggtggaacaccactgttgaggagacaccccagagacaccgaactggttcatcgcggccacttatgaatcagctggctctgcctgtcatgccgcgaaccagtcaagaaatacctgccaggtgttgggctctctgctgagccatgggggaaaactccgagtctgagctggcaggagaaccccattacacaggaggcctcagctgctgagaacatgccttccactcccccagcctcaggctcttcttgtcatcaccctgaacctcctccttgatgagatgaaagccacctcttctctcccgctgcctccatttctctctgtcctcagctccttttcccattttccttttccttggcctgggatgtgtgtcggaacagctatcacatgttttaggaaaagggcctcattctcacccacggtgccaggctgtaccagaggctgggccacacttcgcagttcagcctgtctccccatacaccttcccaccaaggttcccaacttctctggctttgcagggtcctgactgcagactagactgactaactagatgatgtgcattgattgtttccgacttccaggagaatgtggggtgcccagggtgcctgggttagagaaggaaccaaaagtttccttggatcctcatcagggaattgtggtgtgatacagggcggtgaaggggctccagtttcacagagaagtgaagaacgagtgtgcctctttttatgggacctttggaatgacaggaatggaagcctgagccctctccacccagcactgccctgtcactgccccgggacgtccacgtgggctctgggaatgctcctttgctgagacaggcttgggtagtacaagttcaagccctcctctgttgaaatgtgtgtgctctgtttagccaagaggtgtctgcatccgagctatgcagagcaaagtattattagagccggcatcagtgtgtctgtaactgaacccagctctccctagcaaccgttgccaacaacacatctaacagaaggatgcgatacctttttttgaaaaaaaaaagtttgtctcaaccaagtcataaacacagcaggcctgttgtgaaaagacaacacaaaatcagaatctggtgtgtgaccagatttcaaaataaattgctcttctctagcaccttctagaagacagcctgttaaaaagctgaccttgagctaaagagcggagaaactcttcagagtttctggctgggtcatcatcaagcattgtgttttgggcttttcatacatagacgctcagttgagtggtgactctgtgggatctctgggaatgactttagcacagaaggggcactcaagattttctggcttggctttccttatcagtgaatctctcaagtgtgagacaagcctgaagatgtatcttacccatacctcatcctggatgtgtgtgttgcccccacttctacccgtttctcccatcctcctgcccttctccttgtcccatgttttcaggcttgggaagaaaactgggccattcctctaactctcttcctaaggggaaaacctcgttctcttgtgattctctcaaggtctctggaaaatcaagtcattcccctttgtcagaagtttgaagttcctaactcttatcttttacataggaagggaggagggagactgatatcgattcctggagtctaagttttaaactcctagatggccagaatcctggctgagttatcggctgtccccagctcctggcttcatggttcatagtagatgctcaggaaatggctgtggaagggaggcatggagccatcagtcatgggtaccaatgctctctggggcatgaggggctttgaaactcttctgagcactttcctgtgtgtgaatcggaggtaggttccagggcagggatccctccccaggcttatacatggggaaagtggctcagtgaggctgcaaggttcacccagcatcacgaggctagctggagcttctggatgccatgccacatcctaaatagggtgtaaggctcaaaaacttgggaaaatcaagaatccatatcatggttgggagcaatggctcatgcctgtaatcccagcactttgcaaggccaaggcaggaggattgcttgaggccaggagtttgagaccagcctgggcaacataaaaagaccccatctttgaaaaaaaaaataggcaggtgtggcagcattgctactgaagccccagctactccagaggctgaggcaggaggatccattcaggccaggagtcaaggctgcagagagctaggtccctgctgttgcgctccagtgtgagcgacagagtgagactctaaaaaacaaaaaagaatccatctcaggaagtcatcaattgggatttcaaaatccaccctgtggaataatcccactgtgtttccaggggtcgctgagtctctgagctttctgggcctctggaggtcaagggtacctgaagaaacccctgcactctccattcgccctagtccctgtgaaaccacacaggctgctggccccagttcccatctcctccttgcatcctctccctcttctcagaccccctccctcatttctgcacacccaccgctgagccgatgtgcactccaggcatgtaaactaattttaatgttggcccaagccaggcacacccagggatagaagcacattgttctgtgcattccaaagcttgagcaaaagccctggccatacccacatcgagctcccctccactagttgctagaaatcagaaaggctgaagcaaagggccagaggcagtgcaagccgctttccccgtgggcaggctgcacggaagcttgcaaaagcccagaaaagggctgtttttctaaaaatggctggcatctgagctcccgccctgccccctgtgggccatctgtccccatgctgaagcccgtgccctgcaagggacatgcagagttggcacacacatttccctgaaggtgggcaccaacaggcctcgtcaggctggcctggcatcacaggaggccagcagtcacaggagcttgacccctgcccaggattctgtggcagccctgggctcccccaacaggaagagccaatgcctgactcctatccatgttctttgcccctgcggccagagccacagtggataggagccgtgtgcctcgttgccaatcttgttgtctgcacttgctttgggatgagtaaatatgacctgcttttctccaatctttatttcttctcaacgcttattgagcacctgctatataccatgcactgtggcaggtcctgtatgtctctgttcatttgccctccactgtggtctttcaatctgtttgtgcaaatcttaagcattgcattcaaggacccaggtgggatacctcaatgtcagtgcttagaccagatcgccctgactgttcagtttgggtggggcgggggaacatgtggcttccaggagtgctaagcctgtggttctctctggagctttgaagtgctcagtgagacagagcagccgatgaccggatcataaacaagcattttgatttttgaatctgaaaataagcgaggaaagaaaatgaccactgatcctcagccagtcctggaaagtgcccagaacagcagcatgccaggtgtccagtcatcatatcatcaggggggcctgggtgctgctgctgtgccaactactgccccaggcccccagggaccagtgagcttcctgcaaaaccaagtgcccagcttcctgcctctttgccactgcgccactgtgccactgcgccactgcgccactactgtgttcttcaaaatcacagagagccccgctcctgagaaagcccaaagtgcctttctgtgcacggcatgggcttttacaagtctcatgggcagtctactgcaggccttgtcagagactctagatgtgcagaggctgagggagccttggacaaaagtcactcctttcccgtgaaaagtggccattgccctgtgttgttaggagcgtgggtggctcaggaggggagagcaagaccagcctgcagcttcatgaatcaggtcagctgggccatctggagcagacaggtgtgggtcgtgcccccgaatctcatttctctagacaggatttcttgccctgaggcagcaacgctgaggcctgaggagtagcaaacctgtgcagtagcatcgattgctgcctcgatgctgatcttgagcatttaaaacatgtctctgcacccacgtttccgtcctgcaagggatgattgggttgtggtagagcttaaatgaggtaatgcatgcacggaccccagctctgagccacaccactcggatggctccatcagtgtgggtgccctgccctggtgggatgaactgggaggcccttctaactttatcccatcctagattcccaaagaccaccccatgcctcagtcttgggcagcatttccatttcccccccctacgctgattaaatgtggaacaatgagggcaggcaatgagtgcttttagactattgtcttcctgggcggtgggcccaggattgacaggtgtactcttcctcctagtcaaatctgcctcctccaggaaaccttccctgatctcccagcccagggacctcaccttcctctgactcttgaacatttaccatgtgtccctttcatgaagtcttctgggctcccctgtttaagcttttcttatctgagacttgtatctgtggatgtcttggggcaaagaatgcgtctgggtcatctttgtgtcccaccaccatactggtacccacaaggtattcatcaggcatcagctggctggctccaggagcttccttcactggggaggaaggagcatggataggcaggcgtgggaatagcacaggccacagccacaaaagggaatggcctggggttttctccctctcgcttctgggccaggagagctttacccaggtcaggaattatttcaccatcacccgtgtcccttgccagaccgtgtccccttccctgcatgccctcaccccccacccagggttcattttccctgctaaatcccctgatagaacttggccgggcactgccctgtctgaggctgccacgccgaagcaggccctgcagataagtgggttaccggagaaggccagctcgggtgtcccaggccccagagggtcacccctggctggctggcagctcacccccagcacctcctcctcctccttccccggagccaggcaggcaggagacagcagatccttccccccagctctgtgagcggccggcccccagccgccgcggggaatctgagctatgctaagcggctccagatcgcagcatctctgccctgcccgggcacggccggcccagacagggcgcctctacctgccgtggctgccgctggaaagctggcaccgcctgggctgatggaaaaaatctccctgcgggttatgtaactgctcaccgccctgtccctggctccccagggaggctcccagccactaccaagagagagcagtggcccctgggcaggaaggagaccacagagggtcactctttcaaaaggaagaaaatagtgttgcgttatctgaggtcctcctctggaaccagcctgtgcatggcgccaaggtgtttcctgaaaatgcttaaggagctcagaggcctgccccagtattatagcaagaagagagctaaacctagcgggagggagtggccacagaggaggaagagggcaggacagctttgttactgtttttcttttcttttctttttggcaaattattattgcagtaaaatataccataaaattcaccatctgaactagttttaagtgcacagttcagcagtaccccgcatacctacaatgttggacaatgcccatgaccatcccccggcaccccaccaaaccctctcatcaccccaaacaaaagccatgtacccaccataactcccctacagcaataactcccctacagcaataactcccctacagcaataactcccctacagcaataactcccctacagcaataactcccctacagcaataactcccctacagcaataactcccctccatcttccatctccatgaattcacccactctacaaatagcacacatgggatatcatacaatatttttctttttgtgcctggcttatttcacttcacatcatggtttccaggtttattcatgtgtcagaattcccttctttttcatggctgactaatattccattttatgtctataccacattttgtttatccatttatctgtcaatgggcacttgattttcttccaccttttgactattgtgattcatgctgataggagcatgcatgcacaaatatctgtttgagtccctgcttttgattctttggggtatatacctagaagtggaattgctggatcatatggaaattttatctttagctttttgagtatctgccaaactgtttccaggaagggtgtttttgatgggggaaatatcatgaaccaagagccaaagaaatgacacaactgagggacaataaggacactgccttactgaaattcagctgagagctggaggaagtctataagggggaccgactaagaggcagaaggatctggactttataaagtgggactcagggagccattgtgggttcttgagatgtagagttccaggatcaattaaaaatcatagaccagtgtagacttgcaggaaggatctatagatcatccagtccaaccccctcgtattacagttgagagacttgaggcctggagaggttgaaagaggccatgaagacatgttgataggtcataggatgttggacttaaagatgttttacatcagagaaccaggggttctaggtagccacgtggtctcttgtggagagggagcatatccaggcttaagcctgcccctcaaagacctgagctgtgatggcaggcctcatttccctgccctactctcaggatcctgctctctggcccctggcacatggaactgtggcatttccaccaccacccccaccagccagagccaggagctggggttgcctgccatggggaactgtgctcccctagcgctggtccccttccttcagtaagtgccatggtgggctccaagagcttctgggacaagtcagtgggcatcttcgaaccagagcccctgggtgagcaggcttccccaggggtacatagcctgcattccagagagggcccctaacattggcctgtgggccgctgataggaagaatggatagagactccgcacagggtgccccacccccggccctggtgcccctcaccatgctgctgtgggcttatctccttgttgcccttcgcccataccaacctgcctgagctgcgtttctgatgcctataatgaaccagaagggagttgaggggacagagggggagaggaacaggaagaggagatgacaggacaactctttcaacagccagcaggaatgccacacttggccttcaaccctccgctctaagagtatttatacccacagtgttcagggtggccaggttccaccttgtctagataaagagcaggcccccttacggagacagaggtctccccagctcccctccagacagccaccaagaggtcaggaacacacagagtgcacggcgcagtgcatggaagggaggcgctgttgcaggggcagccatcagtgcctgggttactctgaggccaatcggcatcatgtgagcaatttaaacccatggtgtgcccaaaggccagcttttcctacttctaggtcttccctctctgggcccctctgtccaggagaggcggatacactcgaccagaagcagaaccatgggcacagggagtctgcgtcatgctggctcagcatggctctgcccttgaaacccagagcctagaataaggggtccctgtacaccgccagagtgcctcactgcctcccacctagagctcaggtttaaaggccttcactcggtatcagggtgcagagctctgagtcttcagggaaaaacagcggcctctttgggggggacagggaggaacctgcagggaacgaccctcccttaaccctctgctggcccttccaggacagatcccaggtcccagagtgagagaagcttcaggccactttgaagtatgaggacaggcatgctcaaaatcgtcccccctccagcacccccttgacagtgccgagcctgagaccaagtgtattccagagaagtctgtatgcacccaggtcattcacacctagacccattaagcagagagggcttgggagccagcacgtcaccatgtcatgcccctgcctcccagttttccgtagagcaaaggccatacgaaagaagggggtagcttaggaggtatttggggaaagccagactccagctaaagctggtgaatagctataatcggaataagtgcattcttgagcagctgcgtattggagcgccacatattggacccatacttagcatggaccccattaggcaaccgtcattgcattattctgagtattaaaaaaaaaatgtggcaaggggagtaatatctctaaagtggggttcgaagcacagtcacctggaatcagccttccctgccatagacccttcctttaatgccttaccacctgtggcataagaaataactcaagcggccaagagccagccacctccccctggctctagttgtggcgccatgcaactggttgactctgggtggatctcaagcgtggcagccctacacttactcttctgttaaatggggtcataatacccatctcctcctcctgcctactgcactgacattatcattgttaaaatccactgaaatgcctgacttttacctgtgttcccttaagactcctcctccaggagaaacttgtgaatttcatagcagcatgtttttccttttccttttgatgattccattcattcaaggttcttaggggaggtcccaggcagggaaagcgccctgagatgcccacgcagagattcttccacaagtccaggggcccccggcacagtaggacttgaggtttgggtgcagcactgtagacagcccaggatccagccacaaggaaagctctccaaggggccctgggactggcctggaggccccacagggttccctgagctcagtactgtgaaaccccagtgaaacaggcactggcctctgcctgacacataaaggggggcagggccagctcagccagagggcagtttaggaacatcagaggaaggggcaagccctgtaagtggagtaggttgaggaaggcttcctggaggaggaagcatgaaggaagaggcaggatctgggtggaaggaagacaacaagaggatctgtaagtggcaggaccctttgagggactgggggttgcagaggaggattggggaaggaggtaccgccagcctggcggagggtgtcaatcagcaagcccagggctgaggctgcccagccgggccgtgaccccaggtcactgtaaccacactggcccgttcattttgctggcgcctgcttcttgccatttcaggccaagaccatattttcatccaaaactaaaacttctacctcaagaggcgtgagtttcctgccagccttgggccgtcttttgcaggtggcagagtgggctgctgaatctgcgaccctggccaggctccagggcctctgaaccctggggttttgctgaggcaggtggtgtggcaccaagggcctggcatctgaggccagaagatacccgccacccctccctggtgaggttactgccttgtaggagagggtagggatgcccacctccatatgcccccatgtgccccaaccagcccctctttgtgcaccagctgcttccagagctatatggagatgggcgcccaccgcccaaccaggcacagaggtgcagtgctcgctgtgggggagggggagcatgatgccacccccaggagctctgcaggagccagagcagggttgtgcaggaggctgccatggggcgggtctgcacagcaacacttgctgctttcacctcactcccctctgcagaagccccttttcctcccctccctcaagtggtggagcaggaggcagaaagtctgaagccagcccctcaactaatgtcaccgtctgagcctcagcatccccataggggaaacgagggcactgggtcgggtgtggtctgtgggtcaggtctccccagccaggcaccaggccctctccagcagagcctgtggcacctctgtctgcctcgcacagcccctcaagtgccttgagcctgtgaaggttgcaaggaggtctaggactagggagaggctggaacccactgcgggtgggaagagaagatgggagctgctctgtctgcaatctggcagttgtttatcccaaacagggaaccagaagctgaggatttaaaggctcggcgtgggaggaggtgctctgggctgcaggagatccggtggggagccccagccctgcctttccctggctgggcgacctcaggccaggccttctaccctgatggtggcttcctcacccataaaacatggagaggttagaagtcatttcagacattccttccagctttgttatcccaaagcagatgcgctaggcaaacagagggtgcctgctaaaatgcctgttgctgactgattggttagcgggttgaccagtgcagagcaggacccatccccaactctccccacccggcgggtctggccggctccttcccacccgcctggccccatttacagagtctggggcctgcttggcttgtgtgtgctggcggcagcacctgctgggtgggcagggcggcctgcagggggcaccagtgtgcaaggccagcccttcctgcctgcggccacctcccagcatcttggcatcctgggggctgtcccacagggaagatttaaactatatgatggtgaccgccaccaagccaccctcctatgtgcaattttcagaccccttggggtcccagccctgagtccagaaacctcaggctgagagttggactagaacccacagcaagggtcccctccagacctccaaaatgggccagtgtagtactcattcccattttatacccaagacaaccagggctcttggaggccacaggagggccaccgaggtctcaggtagcttagaaggaggacagagcatgggtcctggattccctgggaacagtgcctgcccagagacccagctgcccttaggaacgaatgagtatcaaccagctgaggctgcattttcttaaaatgcattggtttgtctagtgttgtttatgttctttctcaaacagcaggaagaggttgtgggaagagccctggctgtcaacaggcttctcccatgcagtaggggtggacagagggactgcagccagggtcaagggcaggccatggggcggtgggacagagagcaggccgcagcctcatctggcctcagtagccttgtacagaggcaaaggggcttccgtgtggggtgtcagctccttccacacctgcctggacccggaaacaggcatgccttgagtcaccagcagtgggcagccgtagagtcactgtttcaacaccgccaatttgttggtcccacgcctggggcccctgtggtcattgcagtatgttttatggaacattctgtgaggattcctcttggggttttttagcagccacccgttaggatgttcctaaagtagaaggcaaacagcccacagggcctcagaattctagaaaaaatgtctgtgcacagcatgggagcctgagccaggagggcattctcagccatcttctaaggagccaggtagaaaaatggggtcgattctattgtagttacttccttattttagctattcattcagaaatgttagctgttcaaagggtatgtcatttatcaatcaggaggcgggagccccaggtctgcaggagtgcaggggaggatgtgagcaggtcagtcacaagctaacttagaacaagcattcaatcccccagaaaatgcaccggggaaagccacaggcattcccttttggtagaaaaggtccctggtctatcttcatcgatgggactctcatccggggtttgtaccaggggaacctggccaggggatggccgttcagcctctgggcatgttgggagaaggggtagttcatggtgtgccctgggcaccccatttctgatttctacccctgagccaggaaggcctctcccatcaaccaccgtgggactgtgaagcaggtaacaggcagaggtggtgggggtgtccaggggcctgaggtggcggtgaggatgggcatggagtactacacttcattgaaatgccagcagccaggaggtgagcacctggggttgggagtgctccctgaaccccagaactggaggcgttctgggggcattctcactagcaccgcatcgggacacatcagtccagcaggtcgcgctggtccctggggagcccagaatgacagtttgtttctttttgttctggctgacaatgatgccacaaagctgtttcagccctgactgagagtacaggatctggacagccccgatttgaatcctaagtttaatacttcgtagctgtgtggcctgggcaagtggttttccctctcggggccccagttttccatttataaactggggtaatagataatacctgcctcctttgggtggatgaggcttgaatggtggggacgatggtgttagtataaacacaacattgactggtgtcgctcatgtctgggggttcctgtcaggggtccaacaggaacaccagttactcctcctttgccattgggccagctctctgcagtcactggctggataccagctgtatgcatacactgtgggccataagtatcccttagacctttgtgggtgggggttaacagccccattttatacatggggaaagaaagttccagagagcttaggaggtatacgtcaagtcacgcagctggtcagtgacagacagaactggagccaagtccctggtaccccacactctgtctcctcagaacacactgccacctgcatgccctgattggtcaggagtgcatctggagggggtcagttataaggctgaggagaggtgacagggaaacgagataagaaacatgccatttaggtggccatgctttcagagcctcctccccacaggccaggccttgggctctccccactgccatcttatgaccaaaagaattgagagacagcttcccggccagcgcttagcagcgggcttgggtctgctgcctcctttcctgtcttgccgggggtgggggagagtctccaccaagctgcagacagacagaagaatggttccttgtcctcccaagggggacaagacttctccatgtccttccttcccactgggctggtttccaacccaccaccttcatgattcgtgaatgcaaagagaagaccacttagatcggtatgttttgcttccacttggcagccctaggtgctggaggctgcagctctgggtgaaggtgggccctggtctgtggggtatgggcatctgtgagcaccatctgcatgcagccccggaggtcaggtggcagagtctcccatgacaggttccagcagcagaagtcctaaggaagcagcttgtgtctcagatgaggctgtgtacctccgttgcctgtctaggctggaggaagggtgatggcacctttaactggtcccttccttacagatcactaagtgtaagaggccaagcctgcaaagaaaaaaagggagagggagagaggaaaaaaaactagagcctgtgcgctatgtcatttctaacactaaatgattaagaagtgaggaccctggggtgtgagccaaggcagcctgggttgctcagtcctctagaaacccttctaagctttcctcagcacacagcccagagtgctacccggagaaagagccaccttgtaaatcgctttcttcactgtgctgctatgcctttcaaaacaaaagctaaaaactcctcccacccccatacaacttgatttatcatgaccccgtcatctcggtgtcccggtgttagttcaaaatcaggctcaaaactgcaaaggctggagggagactgtgggagggtgagggacactttatccagcacgtggcacacgcacctctgccgcgtcggttcatgcgtgtccctccctgcgagcttggcggggcactgtggacactgggttctctgcctgataaagggggatcctttcatgtagcatgcatcaagatgcatgcatggtgtgctgggctgtctcagccactctcccaggcttccctcctgccggtccgcacacaagaggcagcgtgctggggagccagtggaataagggccccacaggggcaagatggccagaggccatttcagcatgaccagcatttatggatctccttctgtgtacctagcagggcagagtgcaggggtagggcttaaggaggggggcgtgctgatagcctcaggaggcccatctgtccctccctctctccctggactcctctgtcatcccatcccctcctagctggcatgatttttcctgtactcagatcgcaaaagactagcaagccaatatgtttgctgggggagtcacagaaggcgaagacccccccatccctgccttcacggagcttctggctttgtgagcccccctcttcttgttgtcaggctcccaaatgaccccaaagggtttgcttgcaaaagtttgtcctctggactttgtgtttttccccatctgctctaccctcctagtgcctcctggctccggccccagcgccagcccctgtctgtccctgcaaacacaagtcagctgtgtgtgcagacaaagccgtgcgccgcagcgggggccgggcctgcagaagggacatttccagggaactctgggggcggcggctgggagggcagaggcgactgtctgattagcagagactcggcgtcacagtctagggcaaagagggtgcgggggatttggccgggccccaggggccagtggctgtgggtggtgaccaggggaggcagccaggctggaagaaatctgctgtttgagaagtggaggaaacgggctggagaggagagataacagcccgttctctgtgtatctgcatgcgtctgccggcgagggtggctggagccgggcggtctgaggccatatctagcgagatttttgttctgggttgtgaaagtgacctatggagccagcagcagggttcagggcctgggagagaagacacgtggccctcccctctcctccccttgtcttgtgttagtctcccctcctctcccccttgtcaaacagtagaaaagggagggggcatgggggcaggagaggaagcattcttagtgcggtaaaaggcctgggtttcggtctggattgtaccactaatttgacatatgaacttggatacttcccctaatatttctggctgtctctgtctcattggctgtaaaatggggattatttataactgctctgcatagcacgcatgaaataaggacgtgaaaatagtttgtaaactgtaaagtgccacgtaaatgttaaagagttgtactgattcaaactgctttgaagcaggggctggggctgctgattaaagacctgccttagatgaactaggtgctgagtggtgggcaggagggtggggtgggtaggatccaagacttagggacccagaagtttccatggaggcaggggtgggtcacgggcccagccaagtgagccctgccagaaccaggacccagggcaggcgtggagggtgaagtccaagagctctctgggtgggggtgtttggtcatgggcttgcagattcaagtagaaggtggcctgggttgggcatggacttctccagggagacaggggaagccatatgaagccccttgcccatcaagctccagggcccctgcctggcctggagcataaagtcccactgattgcagagggatgggggcagcactctgttttcctctcctgagcctctgccacccaaggaagccaggtccccctgtccccccacccgctccccatcctgacctggaaatcagccctctctgatgtggaaactcaggcaggagctggcaggggtgacaagactgtgagcgggagagaagctgagctatttaaagcgtgcagcgcccaggggacatgaatgccacccacccacaaggccttctcagcattcgctttcccctccttggcccagatcccaggccctcagtgcacccacagggccacaggtcaggtgcccgaggctctgggaagctgcaggcggacaggtcctggggctggcatgagatgtggttcagtccaacctcggcttgggttccctcctctgggcctccgggctgagttggcggggccacacagactccttggctcctgtgccttataaacagggctgagtgtgagtgtggagcttagaagaggaatgcccacgcctgtggcccggggcagctgccaccacccacccccactccactggctaccaagccaccagactcagagagcccatggggcaggagtgggaagtggggagcttcgcctgtagacccttctcccctgcccaggcctggcttcccagaacaccccagattacagatgtttttctccttcatctccaattaacatttacctgtcctgggtcctaacctttagtgaatgacagggtgtactgtccctcccttcctatctgggaaaggctgatgtcttagctgggaagagcaactgggatccaggcctgttagacacagggtcccatgtaggccaccacaggtctggaccacctgggaggcctagctggggggctcccaggggccagtccaccaaccacagctggtctacattgcaccagcacggcttatgtatggaatgacttgaaaagtcgtcgactgccctttctgggaaggactggctactactctgagattgcatccttcctaccatattggcattaagttgtcctttcttttatgatatgacggatgaagctttaaaaaaaaaaatgcttagcaaaataaaatgtgggcaaccctcaaattttaccagtccaataaatcttggagctcaggactctggttccagaacagcacggttcacctggatacccagctctcctggcactgaggagcccggggataagaggaactgttgagtgtgtggggtacagcctggggaggcctccgaccctggggctgcatgcctcaccctgacagtaacttgcagcttgaactgccagttcatctttacacctgggatttccaccccaccccacctcctctatcctctcggctggagacacttcctcccacgtggctgggaattcagtgttttgctgtctgccgcaggctgccaccatcccgtaggccgggggaaacctgcggaggctgcctccaggcaagcgctgcctgccgaccaccgccctctgaccccagtccaccgagccccagaggcacccagtcagcactcactccctccagccttacgtagcgtccacacgtatgctgttacccacacgggccaccaaacctccagtcccctgccctatctcacacacatctttacattgctccatgtgcactctagtggggatggccttttccacaccaagattcattcatttatcagctgagcatgtgctgtgttccaggcagcgagatggtggaaaaatggaaaaggaggtcccctctcctgccattgggcatctcctaatctggtggggaatgcagacagtacccagtaactccagaccagcatgctaggtgctgtcatcgcggcacacccagacggccccgagcatcgagaggagagagaactcacatgagggtgtctcacagagagaggaacacaggcctgagtcccagcacctgggctgggggtgccaaacaaagaaacgtgcagaagggcattgtctaggcgaatacaggagcatgagcagaggcaagaagcagacaagaatcatgtacagcaaaagaaggggttgttcccgagtatagtgtgcactgggggctgaggtgggaggagagagtgtgggccagaaccagcttgggaggggcactgtttgccctacctggtcggagggaccataccctttggtctctggggcaccaccaaaggtttgtaaggatggaggtgatgtctcctggttggcatctttggctctctctctgcagcaggatggaggagggcaggataaggaccctgggaggagcaaagcaccccactgggggtgtcctattggagcctcctgggagagccaggagaggtgtgggcagcctcaactctgtggcagtggggcctaagggtcaggggatgatccatgagtggtcagcaaaaagagagagacagagagagaggtggggggactacctgtagagcagttaacatgcatcagcaccacaagcaggaggaccgctgggcagagaaacatgtatgcacattcatgcacgtgtacatgtgaataactcctctcacacatgctggaggaaaccctcgctgtcatccacactcccaggaatggccacattagacatcttccccctagttcctgagaagcaaacccgggagagcccagccctcagccttgctgcatgcgtgagcatggagttttgcactctggccagttttgcctctagttctttgtttctggaaaaaacaggcactagggtgaatttcttttctcttttcctaccatcccatcttccttcttccttctcttttgtccttccttccttctttctttccttccttccttcctctctcttttccctccttccttccctctctttctttcatgaagaaaagctcacagaaaggcagaaggaaccacagtctattgacgtttctgactcttagaggctccaaaccgaaactcagctgtggttgctctaagtggctacaaaattagaaaaataatttgcagaaatgaaacctgacttgggatgccgtttcacaaaataggctagatggccttgatgtgtcatgaggctcccaccactgcggcctgcactgctggaggaactcctcacatctcaggctggggagcatttccacccctgcagtcaggcatcctacagaaacctgccccctgcctacctgaagacagttcacagtttcctctgaaatgggcggaagagctggacccagccacaagaccatcaaggaaagcaaaaggctttcaaaagtgagactccccagagaccaaacccaggggaagggatctggggattcttaacagactccctgggagtccaaaccaggctgtgagcttggctttgccatgaactagctctgacctccgtgcctttggtaaacagtatcaacagctgccatttaccaaatttctatggggtaccttgcttggctgcacctggggagatttggaaaatgccaatgcccaggctatgccccaagcaaattgtgtcaccatcttatgggtaggacccccgcatcaacattgtttaaagcttcccgagtgagcccaacatgcagccacagctgagaaccactgcccccacccatttggctggagacttacgtaggttcatcctcacagcaaccccgccagggtttatgaataaggaagctgaggctaggagagtttgaatcactcatccgagatccttgaggttctccctcatcccaaagcccatcattcttcctcctttgcagggctggatatacctgtacagaccccgcacagcatcagtgagtgatccaaccagccagctgaaggagctcagagagcactgcagggagacaggggaggtgccggcggagcagtctgcctgttcctggcgtttgggagggggtgcaagcctcaggcctgtttttcagcctccctcccaagtcacgattggtccctagtcctggggatccaggctgtctgggtcagtttgaacctgagcctcactcagcagatgctcttagtgtctaagcccagcggtgggcactgtcaagagcctggactcaggagccgcattcctgcctaggttcaaatcccagctccactacttataagctgtgtgcctttgcaaagtgagtgatctttctgtatgtcagtttcttcatctgcatgatggggtgatgttagagttgttaggagtactaaatgagacagtgcatatcaggattgaaagcagttcctggaacatagaaaacaagaaaatcccaggcactgtaaggattacgactgtgaacgtgcagttcattgctgagcagaaactcgatggaacatgggcctgaatcagtcaaggtgataagtttaagtcaatgtttgccctttggccttgcctgttcttagctagatcagaacccctggggtatggagtccacacctggaacttcgaagggaaaggaggaacctgttttccctctttggcctcaccccagcccaggggtccttcctcctctcccaccatggtcattaccacccttccccccacccacccccagtcaaatactgactctggaagcaccttctgcatggggcagggggtggcctggatgacctctggagctcctcaccccaccatggcagtaaatctcccttcccctaccccaccactcagcctgtgccctgctggagcccacagcccatccatatggttcatcagcagcctgggaggggccctgtggctgggagtttgtttgaagcctccagaccattgaggcaggggcggagctgtggtcaggacaacagcagtgcctttcactggctctctgggagcagctgtgtggggggcaccggcccagaaggatgaccgacatccacccgcagtccttactatttgcgagggatagggcaaaggaggggcccagcccaggatggctgtgaccacattggttcacatgttaagtatgaaaggaaaagaaagaagggaaggggaggcggggaaagggaaggaagaaagaaagacagaaagagagggagggaaatagggagaaaggaaggaaggagggcaggaggaagggagagaaggaggaagggatggagagaggagactcacatctcagaagagaaaaagcaccaggagctttccttagtcaatcatctgcctgcaggttgctttacactcagggctgtgcagcccaactctaggcctcagccgcctccattctgagggccttggatacaattgcccccaaaccaggcattccaaccagggaccgtgacgggccccagctccaggcctcctgggtatcctctcatggttgagtctgccccctcctgagaaggaagaagaggcagggtgtgtgtcagcctcatcacgcattccatctcccagacggctgcctctgtctgcctgtgcagtctgcttctcttccaaagggtggtttgcagtgcagattcatggctcccagctagaaacagtattccctctgcccctgcgccaactcctgcccaattcttctgctcctcacccagttccccagcaccctgaggggactggccacacagaaaggcatgagaaagtctgctggctgtgtccacagtgccaagggttggaggtctggcagtcctctgcgtttggtgtctgtcctgattgtctctcctgggggtgacatgggcaggatctcagcgggaggtgaggctggggccaggcacttcttctccctgtaaaacactgctcagggagagcagctttgctgaccttgagctgggaccccccctttcagagtctcccagtgataatccccatggggacaattggatggccgaccctctctagcctttaggctggggggagaagaaacctgaatttggggtttttgtctctttcccagaagaggggtaggaaagaatcagtaacagcaatagcctgagctggaaacatgctcaggggccagtgcgtcccagctttgagtatagagcttcattctgagcacttcccacataaaacacaattggggtgccccaaggaggggcagacaccaacatttcaggccagaattccagacacttgactcctaggagagctttgggtaagctgtctcttcctccctagccttggtttcctcacctgtaaataagtggcctgaagccactgagggccttttagtgccagcagtgaatcctgtgactgtgttcctcctatctccctgtatcccagggccacacctggagcatttttcccctgcctggccacatacctgcccccggaggccttgttactaagaagggctcatggagctggaggaggtcaggggagcagtgggaacagccagaggcacagtggcagcctttgaagataagattcctaagtctgggaaatacagaggtgtggctgtaataggaacaggacacagaccctctcaccatcacagggaaactcaagggtctcccttggggaggtcactacagaaaaaatgagaagaagcacttgtacttctgtacagggtgggtgtgaactcatcaccggcccagaggtgtaggtaggccaacagtggacacggatgctagaaaggtactatgacatcagagtgagcatgactgagtctggttaacgatggccaaaactgtcccattcccaccatccaatagcacacctcttaggcctgggagaccctgggcagactcaggaggacgtgtgctgtgctgagcctgaagaaggtggcaaagagcaggtgtgtgcacgtaggtccctcagcacccatgggacatgttcctggactgcaagcctcatcttcctttagtacagtcactctaggcctctgaaccattgcttccttggcaggaagtaccaaatcacagagaagcctcaaatcattttcttcgggtttagggaaagtcactgattttcattttcctataacatgatgacaataagggctgggttcacatcccagctttgtcacagactagttgtgtaaccttgaatgggtttcttactctctccaagcctcagtttcctcactggtaagatgaggatggtaataatgattgggttggattgctggggattaaatgagataatgtagtaaagggcataatacaaccctggccctcaataagtgctcataatgttggctatggttcaattggactttgcttgggataatagtgaaaggaattttaatttcagtttgattcatcaggtgtgcactaatattataggtctagccctgtctgaaactctagggagatacagtcaagtgtagatcagtgacataccatattcatggactagaatactcagtattggtatgatgtcacttcttcctaaattggtctctagagtcaacagtctcaaatcaagatgccattaagccttttgggcagaaattggcaagctgattctaaaatatatatggaaactcaaacctacaatatccaaaggaatcttgaaaaaagaacaaaattagaagtataaattaagggctttgtttttttgctctcaggaaccttaagactagtggggaagactaataagagaccccatgctgcttcctaggaatgtagggtactggtgaagagtatagatgctagagcctggcccctggctttgaatgctggctttgccacctgctacctcatgaccttgggcagggtacttttcccctctctatgtcctaggtgtctcatctataaaatgggatgatcacagcttcattgccatggggccattgtgaagatgaaaggagctaacccatgttagcctaaggctgcctactaggtgttggggaagggatggaagtagaatgaggacagaggttccgcccccagtaccgtatgtcctttggagaaggaaagcctagaagctgaaccacctttccaaaaagggaaattctggaataaggatctcaggctctgtgagtacagccacctccttttctaagacccagactggggaaatagctcatccagggtcacttggctgaaggttaaatacagaggaagtgtccaacaggcagggagtgtgagcaaaggtccatggcaaggagttacagcggtgcttcttgggccatgggagaaggctgtttctggagtgccgagttcgagggggcatggggctaagggacagccagcaggcatgagtcaccaaggggcaggctgccaaatccaacaggacgccccatggagccctttggcctgggcccagctcagcagccccctccccatcccccggacacacgtaccccaccaggcctggagacatttcctgaaagactaagaaagcactgggagctggacgggcggcctcaacggccagaggcttgaggccaggtctctcatggaggagcagacgaagggaggacgtgaccggcagccttcattctcacaggccagggatttcagaggaacgcggccaagtctagctctgaagttcccacttcagaccccgcccggctggagccacgggcgcctgcagtcgccaccctggaaatcagagaggcacgtcataggccacctcgtgctggggaacacgtcctcctggggcctctgtcagctggctcacctgctggggttcccggatagcccttctccttctgctgggccatggaccctcctctagccagcttcccccaatccctgctctccctcagcccccaaacctgtccaccttctcactccatcttctcaggagagtcctggcacccagaacagacctcctaggaatgtcatgtctctgtctttgaggtcatgagcagacctggggcaggaaggggaggccctgtacaagccctacactgtggctcaggcccagagaggggttgacaccaggccaaaggagggacacatgtccacagatagctcccaggcctcctgcatgctggctggtcagaccatgagagccacactggacaggtgaggaaactgaggcccaagaggaaatgtgatttgcccaaggccctatagcaagatagaggcagagcagaatggaagacctaaggctcccaagccctgagccccaagctcttttaagtcattttcatggtttcacttcattttcttttttcatttccttccttctttaagagaaaggcaggctctggatagacaggcagggacacaggcagggctaccagaaactcagaggaaagaagagagtggcccagggttgggcagcctctacccccagcccccaagctgagtggaagcccctccctcccacccagcctcagcctggccctgggggctccccttagtgggagctaccagtttgtggacacaggaatgtgcctgtggcttgcccagagaccctgagggccagcacctcaatcacagcatctccttgccccaagcagcctgccccgtctcaaccgtagcttttatcaccttcctccatgcctctctagtgagtgtcttccctgagtcagcagaacctgttcatagtcatcccttctcccagattaatctctctctctctgtagccttccctgatcacccaggctgctggagtctatctgtgccctcactgggcactcagcttttgccacctggtgttcttagtgtcatctcttgggtctgttcctgtctctctaaccaaactttaggcaactttgttcattcaacactccatgaattcaaggcctaccacgtgccaggccctgggctatggtgggattcagcagcaaacagacagactcagcaacctgccctcatggagcttacattctagcgaggaggggatgataagcatcaaagcaacagatctgcaaataagtaaatttccaaaaggctgtggagaaggaagcagggcatgttgggggacaattttaaatagggtgattggaaaagagctcacccaggtgacccttggataggcttgaaggagtgagccgtgcagacctggggagcatcctggtcaaagagaaagagcagtgaaaggcccagaggcaggagtgtgcctgccccatgggagaactgcaagaagtccaggtcaggggggtgggtgggagccatgggaaggcatcaggtcagcgggatgctgggatctataggctcacaaggacgagattagctctgagaggggtgggatgcatcagagggtttccagcagggaaggcaaggtctgacctgagttttaatagcgtcactcaggctgctgggttgagaggagtctgaaagggtggagtagatgcagggataccagcctggagcctttagggggacaatgagcataaaagcaatggatccacaaatctgttgagtaaatgtgggagagtaaataagggagagtctaagtaaggggtggtggtgaagtgattagggtgaagggacaggtcagagtctgggtctactttcaaggaagagctgagaggatcctctgaaggactggacgtaggtgcaaaagaatgttggggtcaaggataacctaagatctggggcctggacaactggaagaggggcttaccactaactgaggtggggaagatgcttcaggagggtggaccaggagctcactattggacatgtcatgttggaattgtgcaataggaagtggccaggttgagtggacagttggagcccggcattcagaggggtgatctggatagaaataagcctcagggagctaatttctatccaggtggtatttaggtggtgctattaggtggtatttaaaaccatgagacaggatgccatctccagaggatgaggatctatggtacaaaggccacttggtgtagagcagaagctgtgtctccagttgtctagagttatgaatgggtggctgatgacggggctctgactccaccgctgtcacaacaggccaactgcaggagagaggcttcagcctctgccccctccctgggatccccttgcaggctagcacaagggagggctcaggagagacaagtaattatccttataaatcaggaggctcctgccagggagaagcagggaggggcaggctgcaaccccaccccctctaagtctcttgacatttcctgggaaaatggtgtcattttatcattttattccttggtaaggcttaaatttcagctttgggaaactgacagagaggataggataggtgcctgggggccagctttgctccctgtggctttatataactcaggcctttccccacagccatttacaactctggcttctgtaatgtggtgccagcaggattaagtttttagcgcccactatattttgtgctctgtatttctgacaaaatgtttcctccctcatgatgatagctcagtaaacagaatcccttggcgcaagtgacatgctgggtggccacaggctccggggggcttcttgtgtgcccccttctcctcctctcttttcttaacaattagcccagctcaagtttatcttcatttattgacttttccctaaaattgctcccaaatacttctttgaggctgccataccaatgcccaagcaggaaaatagatgagttcaaaatggcagcccaccccagttttatccgacttgagtgccatttccccaggaaagtgggaaggttttgggggaaaagcctgatttccaggcagccaatacacagaccacaggactgtatcacatagcccagccttgcagatgagatcctgagtctcccagccacccatgcccgcacagtgctggcagtgggatactaaaaattaagcacctgttaccttcgcttctgctctacagatttcatccccatccccatctccccaggggaggcgaggtaatctgtaccaccttgggatcctttgggttttctgactagtagcccaaagggtggctctcagccccccaaagcaatgccccagggccattctacctcactttccccattctagcccccagcttggttcctgctctctgcccattcctcctagagatatgcagtcaataccactcacatcttttgctgctcctttgacagatgtattcctcccagctcagttccaagctgaaggcatgggtgagcctttgaacagtgttaagtcacattaggcacagaatcagtgagggttcggcacagcagtgctggaaagacagggtcggggaaagccagatctaagggccatctgcaactcgagagctaagggcctcagctaaactcccaaacagcaaacctggcctccccagggtgggcgaagggtcttggggccgggggaggggttgctgggctacggctggttctcccacagatggggtggctctggctgagtagtggggattgacatttcagtagccaactgcctgaggtggggggttgaagggaaacttggaatcagagggaagtttgggaacattcttcccagaatagctttaaaaataggacagctttacaaaccacccaggatgattgaaggcaggtgggatcgaagcagatgccctctggagatgccctctggagatgcttgtcagactggaacatgtgggaactctggaggttttcctgattgttcagcagatttcagaaggcagcctcggatcttccttcccccaggccctttgtgtgtattgcattcgagtcagcacctggcagagaggaggcccacaagcatctgtggagggagggatgtgtgtgtggatgcatgggtgatcggtagggggttgcatggatagatgggtcagggtgggtgagtagatggatagatggatgactatagactccacattagctggcgagagtcctgtgtgaggattcatgcagaacatggcaatcctaagtggttagttttgccgtagcttcctgttaaatagatgtcaccttcaccttaggaagaagctatattttggaagcaggtggcattactcctggctttttttgatccttggctggcaagcttaccttttacttgaaggatactgtgtcaaaccatggacttagttgccagagagaggctcatcagagcatggaggctgtcatttcaagagcccccataactgccattctcctctcgctccctagaccccttcagagtgccctacaccctgcaggtgggccttagcctctcccccaacctgatttctccaaggtcacaatttcttgggattctgataatgcagtttttgaaaaatgggccatctcatgggctaccacagatgcaagcctgtacttcaccttctcatctaaccaggagtattttaagggagtcccagataaaaggaagcctgcagtgagctcttccatttaatgaagatgcccattggggaaaaaagtcacttcttagttttatcttattcgggtttcttcaaatggcttgcaaagaggcacctgcatccccaggctctttcagatgggtagtcctattttcccaggagctctttaacctggaaaatagaactagtcctccttcctctggttccccagaatcaagttcaacacttgggtatactttctctgttgtcatcagcctgattactaagaattctgtgttgggaagaatttcagactattaggggaggccatctctcttgagggagggtttagtgtaagaatttaatgtttatagaaaacggctttttttcccccaacacaagtctttgccatccacaccctgggaaagccgagccacctggcacccacagctctcagccaggtaccatctttcctgtgctggaagtcactggaactataggtcaggacagggaagagaagcaatccccaaatgcccaggtgttggttggttggtttgttttttgagatggagtcttgtctgccacccagactggagtgcaatggcatgatctcggctcactgcaacctccacttcccgggttaaagtgattctcctgcctcagcctcccaagtagctgggactacaggcatgtgccaccatgcccggctaattttttaattattttattttattttatttgagatggagtctcactctgtcgcccaggctggagtgcagtggtgtgatctcggctcaccgcaagctccacctcccgggttcatgccattctcctgcctcagcctcccgagtagctgggactacaggcgaccgtcaccatgtccagctaatttttttttgtatttttagtagaaacggggtttcaccatgttagccaggatggtctccatatcctgacctcgcaatctgcccgccttggcctcccaaagtgctgggattacaggtgtgagccaccacacctggcctgaatgcccagttttgaagttggctaacatgtccatcattctgcatgtttatggatcagtgagggcctgtgtgccgacaaagggagcaagctggagatggtgagaacagaaagtagcttatcaacatggacatgatgacaaggaagtggccatccgaacctctgccatcccatcacacctgcccccacactcaaccccacagccacccaagggcagaaggacttagaacaggcaaagccagcccacagctgcccaggggagaaggacttagaatgctcttgcctcttttacatgctcacagcttctggaatatttgtaagtgcactcctactgaaatcgcgtgggtagctgatctgagggacttgtgtgacgagaattgtttcccctatccacactgcttagtgagtctgggctggagatctacagtttccttaagaccatcctttatagagctcaggtcttttttctgacagctggaatcacaggtgcccaccccagagcaaaaaggccatgtcagccatctgcagcactggcctccctctgcccaggtctccaatgtacttgtcagagtcccctgtggactccaaggcctcctgtgatcagccacccggtagatgatttcccagagcactaccctatagggaatatctaaactatccctaatttttctcccttcaaatccaacttgtctcagtcctgtttttctcataaaagggcaactttctggctgggcacgatggctcacacctgtgatcctaacactttgggaggccgaggtgggcagatcacttgaggccaggagttcaagaccagcctggccaacatggtgaaaccctgtctctactaaaaatacaaaaattagctgggggtggtggtgcgtgcctgtaatgccagctccttgggaggctgaggcacgagaatcacttgaacccagtgggcggaggttgcagtgagccaagatcgcaccactgcattccagcctgggtgatagagcaagactccatccaaaaaagaaaaggggtgggggggcaagtttctgagttctgatcccttgaactgtgctggcatgaattgtagctgatattttaccttgtgagttgactggggatttgctggggagacagagccttatcctgatggtgcggtgttaatgggctgacctcaggcactgtggtattctggggtggggggatgctctgaggcagaaagtgcccttccacgtgttcctcagattcatccaatgaggcctgcacttttagtcctccctgggtttctctcctgtaaaacaggaatcaggcagttagatctcatagtacctgtgtgaggtaacagggagcatcttactaacctattctccagatgcagctcagcaaggccgagtgacttgcccaagctctgctggtactctgcactctccttggatgtttgcccaggaagcagagccctcggtggtgggcaaagccagtagcaggtggagagagaccctgccaggcctctctgctcctctgaccacagtcagagtgtctcttatcacctgggtagcacttcctctgcccgcggcagagccagcgccaccaggggcaagcagacgggtgaggaggtgccagacaggattgatagttccagcctcctgtcctttccttctgcagacctgtgagggagctggtgttatttttatctggggacactggcgtgggaggtatttgttaacgtcatctggtaaacgcagttgaattatctgttgtccaaggaaccctcaaataagtagtgttaagcatgctaagccgctcacatttaaagatacagttagactcctgggagagaatttgcttatgctgctgccatcacaactgaagcccagagctgtcagttccagagcccgggctttatttaaccctcttcggtttggggttcatcacacataagggctcgtgcttttttgaaaaccatgcttccctatctgttctctacaagtgggaaagtgcttgcagtctgtgggttcagtgcagggacaggttgtctgcacttgctactgagtgtgtgttaagttagcacagtactgagttccgagtcccatgaagtaactgtgtggcataccggtgtgtgtcctgtgcagcctgcagctttctaaaggcagtttcggggtgcacccccacctgcaggccttacattatagccccctctcttaatgcgctccccagtatttctcaagtgcctctggatcttgctgtgtcctgagaagttgtcccatgggtgggagcagtgggcaccattgtcactctcagcagtggttctcaaccaggagtgattttgcctccagcagacacttggcaacgtctggagatattttatctggagctttcacaactgggggtgaggataggggcttctagtggcattgagtgggcagatgcctacggtgcacaggacagcaccccccaagaaccaatgagccgaccgaaaatgtcagtagtgccaagaatgaggcaaggctgctctaatcttgaggcagatggagcctcctctcgctgccaccagcgcgtgacttgacaggaggtggctgggtcagcagggctatgagtggagaaggtgaatggtgccagccagcagcctcgggtcacgcggagcagttcagaaagtcttactgagctctgcaaggccaggatcaagccagattttaaggggatgataagcaaggtgtggtctctggccataaagacaaaccatgcagttttgtagaatactctcagttcacaaggaggttgtatatctcttgcctcattcaatcttcacaacaacttatgggcttgatgggacaagtagaatcagccctattttgtggatgaccaaactgaggcccagtggggtaaataacttgcccaaggtcaaaaagcagccccagatgatggatttctggtctttcactagagcatttggatctctgtgctcctcttccctcttgggtcctactggatcccatgttggtgaggaatcagtcctttcttgtatttttatctggggacactggcatgggacgtatttgttaacatcgtgagtggacacctgaataaggacagaatgaacttcccatcctagatgccaccctttctcctggggaacttctataatagcccaaagccagagtaatttcattttcatgccttctctggccaagctcagatctagccagggacttccccattaatataggggccagaagcccacctctctctgtgcacccagattatttcctccctggggttgccactgccttggagccccccatccatttattcagttaacagatacacactgagggcctccagtggcctagacgcagcaggtacattgccgaataaagcagacagagtttctctgcccttgcagaacttgcaatccgagtgggagaggcaatcactgaacgcataagcttacaggtgtgtcatttccagttatgatggggccacacagaagagccaacacaacacagtgagggatgtcacaagagtggagggcctacttagagaaggcagagggcctctgggaggagaaaacaagtagaccgagacttgaaggaggtgcatgtgcaccagcttttcagcagccggaggaagagggtccccagctctggttagagaagcaccgtggggtgaaggtggggcaccttggtatgcatggtgacaggatggatttttcttccccactctaccagtatttcacagtcagcatccccatcatcagaaatatcttgatggcctccattcacacatcaagtcaacgtgagtccccacactgctgttttatacctggcagttttgtactgttttgtactctctgccagatactcaagagaggaaaagaggaataagatacccaagaggcttacagtctagccaaggaaataaaacatgcaggcaaaactagggccagccggaacatctgcccccatctccagccagcccatcacattccccaccctcagtcccctgatgtcagtagccacctactgttctccctcctgtctgcagagataccttccctcttgctgactccaacacccaccatacactggccaaggtgtgggaggtcagccaggctaccccataacacctggcatggataaccccccacacacccatgtccttggtaagaccaaagaagcaggaggagcaggcatctgcggaggtgctcccctggccaggcattttcatcatcacggtgtttagccgtgtttcccttttctgggtggggaacgtgagacggtagaagacctggggcttgcccaggtccaagggctgagtgggagtcggaccagagtgcctcacccaggcctgtctggcattcaaacccattgtgcatatcttgacacactagtgattttcatgtatttttagcagaagagttgtttttccaaactcaatctcaggcgtgtcctcaaccacatgaaacagacctggcaaagggcctctgcctgggatccaggagctttgagtctgcccactcaactgcccttcacccatccccacaggtggcccaagcctccttgggaacaacacaaggggcccatctagtcttcagaccggatctcagaacgaatggagaaggtctgagcacttccttcagggccacccccacccccggcactgctcagaacagacctcactgagtccagtggggcagaaccacacagaatggcacactgtgagagaggggcccattcagacagagcccggtgcaaacagctgccatccacgtctgcagaaatggcaggcacaacagtcacttcctggtctataaccccatatggtctccagaggcaggcacaggccaggatcaccatttcacagacgcaaacgttggtctcccccaagctccctagactttgtgtccttctctatcctggctccctccgcctccggctgttcctcaactgttgtccagtagacattttgggatacggcttagataaaggatgtgtgcactcccattgcagcttccttgagggataatgccacataaatgttaacatgacttttaaagaccatctgtggcaaagttcaaagttgtgggtggatgtgagcttcaggccgagtcattctggaatccccattataggtcaaatctttttgtgagcatttcaaggggttttctcaaattctataaatagcttagtaacgcctgtgtattcatctatttttaaagccagtcttccggacaatttcagaagtaattgggccactcattgaaagtagggtttcaaaagtcatttcttcagcttccaactgcttccagagcagagggatcccagatgccatttctgcctagggttggggacccaaccttcttagtagaacctggtccaggcagaaaccgtggagaagactctaggaatctccaaaaagctggataagctgaattctggccccagctcccagttcctcccacaggaaaccttggatacaacattcatccaacttatgcttcagtttctcacatagcagaatatgggcacagtcaccctttgctgattaggaagggttattacacctgtttgcgtcactctgtcacctgggtgcaggtcaaaggtctctttcattttatagataaggatgcagaggcacggtgactggcctgacagtcacatggtgactttccattttatagatggggacacagagtcacagcagttggccagtcttgctgtccttttattttgcggttggcctgctcctcaggctgaggcctcagtgagcacagccccactctgtttccacagagagcttcatgtcatggataagacctaccacctgtgcccgggcctaggcctggcaaacacctgtctccaagccctcggcctctctcctgggcaggatggcagccaggcagggaatatccgaattctgcagagacaacaactcagccctctcctctgaggacctggagggaagtgtaaggcaggggtgggtggctgtcatgtctgcatgatgaccttttcaaacttgatgccttggggggtccaaagagcaccaggcccaggatcagagacctgggttccagctctgtcaacctcagaaggtaggcagatcaaggagcctcatcctccagtgagctgctgtgtggggcagagccaggaaagctgcaggaagtgcctagaaaggcagagtgctgtgtagaggtatggcgagacagtgacatgaacatcaggcaggcggcagagaagatcagggcgccagcacgggcaccagctactaagtgtgtaatcactgagggctgcccttgagcctgggaacttcagccccctcacgccccttgacctgacaagtggtactaacgtcctccctgaggctgagtccagtgacaccttgctttgaggaattcctgcttgtcccactggtattcttcatctgtcagacaatccagccttctctctctgctcaggctgaaaggaaaacttccagcctcttctgagggcttttcaaggccacagccacagcaggtgctggctcccttgcctgagaataaggcttcgcgcctgcctaagtgtgagacagaattcctgctggatcagcctgacttctcagcttctctctgctgcaacccagcgccatccccccgcctccctgtcccctcctacggatcagcagagctgagcctacctgacctgattttgccaatagaaatatgctgggtgctcacagcctgggaaacttggaaatgtctccagagtgatccagatttagctggaagtggctgatggctgttcccagccacagtgtgtgccctttgtctagagccaactgctggggagaaagcatttccagccacagtgtcatgaaccatcagtcacagagaatgtgtctggtaattttttattaataatagttaaaggatcggcatttggggcttgattttcatgtccattgattagagcagattcaagataatcctcatcatatcactctctcttcattcttttggatgggacagaaagggcagcaatcacccagtacatcgggaatttgacatgatgctcaggagagtgtcaggcacctgtgacagccacccgatggtcctaggtaaggcctgtgattgcagggggcagctgttatttctgcgtgtggtccagggatctgtcactgagcccacctgccccagctgcagaatgaccacatgacctggttctgtccaatcagggaaccccatcaccacagccacagtgattgggctgagagatagtcatgtgatgagcagggccagtcagaatccttccctgagatttgagggtttgacatttggggagggggggctctgtcttccttttggctcaagaaccattatgagagagaccaggtgctgctgaccgccatcttagccatggcaaagggagaacctgtctgtggcagcagaaaaagcagtcagcatgcaagtcaaagcccagacaagggagagaggggagagaagggaggaccagccctggggttgctgtttgagccctggggacaggctgtgtcctagggcccaccttccatgtaagacagcccaggcctgtgtgcctcttcagctagtctgagatggtttctgtcactggcatccaagaatcctcagtgtctaggggcagagcagagtgaagcagtggaatggtcaggggtcgttggccagggagatcagggatacttggggaaaggttcaagtccacctaaaaagggacacacccaaacccaaggagtagttcagggcccagctggcatcagaactcaagcaaacttgtcccagggcggaggctgcagcccagtgcccacatggtccccgtctccctccagacaagatgtgcagccaccacagactgttgccagagtgcagagtgacatgcaggtcagattctgactgctccagagtctaggtgtggctgagtcctcagggccaggcctcagggctcagcaggactgagccaagactggcagctgtggccaggacgtggcatgatggccagctgtgagtacagcccagcagacatgccccttggctgggctgcatgtgcagactgccaggggtcgggggcggccaggtccgaggcaggctttggtggatggagtaactcaggatacagctaccaggtctctctgccgcttattcagcacctactttgcaccagatacgttgcacatgttactcatttaagccaaggaggtttgcctgacccaatcagactgatgccaagaccttccacgatgctgccctaggtgggtgtgtgagaggcagggtccatgggctgccacccaggacccgggcaataaccagatcaccccttccctgcttctcctcctatcctgactccagctctgctagaagcactgcccacccagcctcagtgcccacttctctgactctgcccctcaccgtccagtccccagcatccaggccccagtctcatcctcatccccagggcctgggaatccattattttgtcacctaggagaagcctgttgtactgatgagttctttttgtcccaagtcacaggaaccaacttgaggtggcttaacattgctaaatccttttctgtaaggattctgaggtttcatggagcccagaagtcccagggaaggacagaagggaacattcagggtcgtctctcaggctgggggtaacctgatgtgtcacagtgtctgtgggttccatgctgcaggccagccctacgcttgggaattcccagccctctgcttcactgttgataggaacaggtgccaaggaaggactgcactgtctctctgagctggaggctcctgtcctgggctcctcccaaatgatgatgactggggtgagaaaagagccttccaggaactacccaaggccaggtctagccatgggggccaggccgcaggccctgggctgtgtgataggaacggaggagtgagggggcttcactggtgggggggaccaaggaggaaagcctgccggggggattgcaactagcctcagcaaagccctgaggggagagtctgacacaggggagactcggggttggggtggagctacattgacgtcaactgtgaccccaccacaccaccaaagggcggctctgcggaatgtcgtggccttacttgaagcaaccctgggaagggggaaaaaaaatccaataagccaagaaacatcactgtatggcaaaaatgttacccacaaaagtgaaacaaatgtcatgagacggtggccttggagcagggactgggactggcccagagaaggtgggaagaaaatatcaggagtgaactgtcagccacaaatgaaagaaaagatgagacaggcatacatgctgactctgtactcttatgtcttagattaacagccccctaccctttggacaggttgtcctcttagagaagagctgtctgaccacgtaccgtgggatatttatgcatccggtccacacacgttcattgaacacctacaacgagccaagtcccattccaggggacatgaagatggctcagaaaacaggattcctgccttcaggaagcccttctagcaaaaagtcaggtcatcaacagacatcagacctagtggaggtgatcagggctgggaaggaagcatagcagagtcggaatgaggagtcccgggggctgtggtggaggggacagccagggaagcctccctaaagagggaatgtgggagcaggaaggtgaaagaaggaaagttggggccaaataaaaaataaagcaccttttatttgaaaattagtttcctcttttcagtataaagaattctgtcaaatatgttttttaagccatgcaaccaattgcccgggagaagaatgcctgggattgactcctggctgctgggctcccacagctccccatggtctgtccctcccacatgtatccagcttctcaaggaaaagaaacttcctgctagcagtaaataaaagtgcactttctcctccccactggagagatggcaacagcagccacctctctggacagaaacaaaccagggtcactgggggcatagcgtttggatgggcaaatttccctaggccattcattttccaagagggagcccgaaatgagggtgagtttgcagcgattggtaggggctgcccatctccctcaggaagtgtaaaaaatatatgcatcatagtccttgtgcctcgactacccccaaccccaccctccagcagcatctccctgtggtggtttgcgctgctgggtggtgtgggggtgttttttcccctttgcctgtatacagctgtttttggcttggccactgcgctccaccatgccagagctcatgtggttatcccgagtgggaagaatttcccagaatgccttgagaaacctgagacactgaatggctttcagggcttattgatgtggccggtgcaggaaatagcagtacgtcaataaatagttttaggcaggaaacggggcttaaatggtagccttaaagtttggggaaaggcactaggggttgctgggaggtagcctgccaatcagatgagaacctagagccaaataccaggctttgaaatggctgccaccaatctgaggccccttgctgcttttggatacaagaggctgaggttaggggcagagctagaggaatggcttgtttcggttggcagaaaggactccttgttccagaggaaaagctggcaacctataacatgtgtcaagaggagacacacaggctgggttttggtggcctctgggcggggcatgttcacaccccagttccccacccttctcgtgagaatcactgctgactggcagattaccagaagaattccactgtcctaatgcaaaaaatcaaggaaaagggtcacaacctgccagtttcttttaaaatagctgtttttctgattataaagagaaacattcacagagaatcagaaattcagaaagtaatgtagagaataaaggtcatccataattccgctattgagagacaactcctgtgaaacactatttctcctctttctttttaaaaaaaactctattcatggatgagattatatggtaaatgcaatttcagttttgcttttttcatttaacattatataaacattttccccatgctattataaacgtttcataaactttttgttgttgtgttttttttttttttttttgagacagagtctcgctctgttgcccaggctggagtgcagtggcgcaatctcggctcactgcaacttccacctccaggtgcaagtgattctcctacctcagcctcctgagtagctgggattataggtatgtgctgctatgcccagctaatttttttgtatttttagtagagatggggtttcaccatgttggccaggttggtcatgagctcctggcctcagatgatctgcccatctcagcctcccaaagtgatgggattacagacgtgagctactgcacctggccacataaacataatttttaatggatgcatgaatcatcatttacttaattgttcccctgttgttgggtgcttaggtttttagatttttatgtgcattaagcttattttttctaatattttaaattgtttccttatgataattaccagaaatgcaactaccagagcaaacaataagaactcttaagacttattttaaggattttcagaaaagtcataccaatgcccatatataagtgcctgtctcactgcatccttaccagcattgacaattaccattttaagttgtccttatatatatagatgggaaaaagacgttttcattcattcaattactactgatattgaattaagttgttttcatatatgtattagtaatttacattttgacacaggatttacctcttaatgccctttccccatttgttcatgagggatttcatacttttattacaaatttgaacacactatttatatattaagaccattgccctttgtcacatttattgcgtgtattttcctgagcatatcaattgtcttttaatattttgatgcattcttccattgtcttagtgaagaaagcccccctccttccagaaatgtgagaaatactctttcattctcttcaaatttttggtcctttttttttttttttttaacatttgactctttattccatctggaatttattttagagcccagtgtgaagtaagattctaaattattttcctcctgatacttagacagctgtccctgcactgttgcttgagtgaataatgcttcctttgccactgatttgtggtcctcaagggatcatgtgataaacctttgtggatgccaaatttgtttctaggctatctgatctagctctccattcggatgtcagctctacagcctcttaatgaataaagctttattaaggataagttaagagtagtgtaactctttccaatgttgttttgtttttagttatttcccttgctattctttcaaattacttttaggattattttttcaagtcttcatttccttttctcccaaaaaagttcacattgggatatggagtacagattgatattaaacctgtgaattatttcaaagagaattaccatcttcacaatgctgtcttctcaataaggaattgtgtgtgtttcttcgctagttgaagacgttctcttaaatctttcagttttgttaggcaattttctttatagaattcttgcatatttcttaataatgtcacttaagtattttattgctttattaaatgagctttgtacattaaaatctcactagttaattctgtcataaaagaaagctgttgattttgtgtattaattttgtatctaaatattcttattaattagtcactgaactctcttgttaatgatactctttattaaaggcttctctcagattttccatatatttaatcaaatcattttatctcttccattctaagggtcataggtgttgctgccgttttttaatcaagcctattgaagtaatacattacatttatagatttcctgatactaagtcatccatgccttcctgataaaaatctacttggttataatggatctgtttgttagtatttcacttgggattttatatctattcacattagcaagattaacttgtagacttccttatttgtaacttactatcatgagattttgtttatagggaactggttggaaagcgtctctttttctatgttctgagtcagtttgcaaaggaaagcagttacctaattttttggaagtttgaatgaacttacctataaaaattgtaagtttagagatttccttataaaggtaattctttcataactttcattttagcttatgaatttttagtttattctggctcatttcttttttagcaaatgttgatttttttaatgaatcacctatttcatcattttttcaaaattatcaacatagagttataaataattttattatactttttttctatatcatatctgttttcatatctaattttatttctgtttcttctttcttgattttatatgtgatttcctttctctatttcctaagtaattaatttgggggttttatctgtattatgtccttatatttccttagctattgttggttttctaattgttttagttaaatgtttagatcaacattgtctggtagaagtataatgtgatctacatatgtaattttaaatttaataatatgtgttataaaatttcataggtaggtaatatttttaaaatatgagacattttacattctagtttttatactaagcctttgaaaagtaatatctgttttacgcttacagcccatatcagtcgggatagccacacttcaagggctcaatatattgtcacatgtggatagtggctaccatattggataacattggtttagatgatatattttcttccattatttagtggccaaaatagttaagtctataaattgacctttcattatagttttgaccacatcccacaagtttttatagttatttcctagataatctaatacaggtattgtatatttgagtatgtctttatttcatttttctttagaagaataccttttaagtattcaagcaattggctattttttaattgttgttaattcatagtcccagtatgtaacctgtacaatttctatgttttgaaatttatactgagatcacagcttactatgaagcttgtttcaatttaatcttattaactatattatttaaatcacctaagtcatttgttttttattcatttaatcggccatagaatgttagtggttttatttcctgatataattcttcctttctggtttttttcctatgtttcttttttttttcttatgtttcaatagcttcaggtatattcaaatctatactataaagtctataacattttgtgttatctctttattatggattgtatttttatatataaaaccttataattttatttaataattgttatcttaaaaatacttcccttttactactactttattttcatttgctcactcttgtttttacccatccatttatttttttatatcctgttttcagttctgctagtggttactagtgtttacttttagcattttaaaggcatactttcattttttttctctgattcccaagcttaagaaagatgcaataacctgtgaatccttatggcctaaattaggaaatgttgtgtgctttacagacttctatccccttcccaccagtatttactaatctctagtaatttaatcttggattattaagtcactactactataaaattcttatttaaattacattttaaaattaaatatcttctcttccaaggattatttctggcttttgattccattgtataaccaaaattataatgacttattttaacttaacttaataagtctacctggttgtagtttcagttttcccttctgtttcttctataccatggtttcctcagagttaaatcataaattttgttggccataacatgcattcggaaagttctttttattttttattatttttaattgtagttttaaaataacataaaatatactatttcaagcatttctaagtgtacagttcaatagtgtagagtcacattctcatgcaaccagtctctaaaacttcttcatcttgcaagactgaaactctctacctattaaccccccatgtcccctgctccccagctccttgtaaccaccattctactgtcgtttctgtttatgggtttggctactttagatacctgcataagtgaaatcatgcagtattgtctttttgtgactggcttatttcactttgcataatgtgctgagggttcattcacgttgcagcatgtgtcagaatttctttctgtttttaaggctgaatagtattccactgtatgtatatatcacgtattgttgatccattcatctgtgggtggatgcctgggttgctcccacctcttgtcagtaatgctacatactgacatctctttgaaatcctgatttcatttcctttggatatatacccagaagtggaattgctggatcatatagtaattctgtttttgatttttcgaagaatcaccatactattttgttttttgagatggagtctcactctgtcccccaggctggggtgcagtggcatgatctcagctcactgccacctccgcctcccgggatcaagcagttctcctgcctcagcctcccgagtagcttggattacaggcacccaccaccacacctggctaattttttatatttttagtagaggcggggtttcaccatgttgctcgggctggtctcgaactcctgacctcaagtgatcgacctgccttggcctcccaaagtgctgggattataggtgtgagccaccgcgcccagctggccatactatttttcatagcaactgcagcattgaattttttaagataaacatgtaggagtgatttgttttagaacttgcttatgtaagatctttctctcgctttcactcataggcaggtttgttcttttcccttcaaactcatgaagacgttgccttcatgtctctgaatttttaacctcaaataaagaagtataaggccaaccagatttttcttcctttgtaagaagactgtcttttgttccttcgtagctgtttttaaatttttctttttctgcgaaactaaaaaagaaaattcagcgggggcaacgtagaccttgtctctacaaaaaaatttaaaagttagccaggcatagtgttatatgcctgtagtcccagctactcaggaagctgaggtggaaggatcacttgagcctaagaggtcgaggctgcagtgagccttaatcgcaccactgcactgcagcctgggcaacaaagcgagaccctgtctcaaaaaaaaaaaaaaaaatgaaaaaagaaaagaaaattattccgctaagtaaaactggggcagggcaagggacttccggaacactgtgaacactttttacccaaagagtcaactcatttttattattatttattttcagtgagaaagtttatttctctgctctctttgttctgtgtattctggtatgctttttgaaaacttctctaattcacagactagatgtccactctctatcttctctatcgtttttctttttgtttctagtctatttatctttgtattcagctttctggtctatttatctattctgctctctaggtggtttccaagtttatcttctgcattactttttctgcattatccattctatcctttactgcctccaattcattttgattttgctgttggatttctagtttccattggctctctcctaatcccagttcctgtctcacacttcatttcagcctgagagttgcttagctaatcacaatcccttccttcgaatgcctattcacacatcatagaatctatattgtcattctccttacatacaagcccacatgttttgcacttgagtttttcattttatttatatctggttgattgtcattaatatgttcagagttacacatttccattaagttttcacgacactgctcctttattctgccaggcaggatttttgtgtagatgccatattgctctgcgcctccctcaatcctgaatgagatcacccctgtctggtcttttgtgtttgctgtgcgcatcagccttggactagcttggtgtctgcttaggcagagtctccctctcagacctaaagctggagggtggcttcatgagctcatctcaaatccaatttccaatatttagcaggcattcaatctcctagtaacctttgctagcccaaaacagaatgctctcttgatgccatggatgatcaggaagaaactgagtcaagagctagttctttgatcagatgcaatctattttttaaaacttcagttccttgtacacactgcctccaagttttttcctgccccagagggctttgcctgagagcaccatcccttaaaggacacagcatttcacccagtctcctcctgcccctgcactgccccgaatctccaaggcctggaataagggtggtgcagatgggagctgccttaatacacaggcacagggctttgctagtactgacagatactgtctaccagccagagacagatagaggaaggggctgaagcctcaagctaccccctgtctttggtcttctgggtcccctgggcaaccagaatttgttggtgacagcactttagttaatgatgtcacctcctgagtctgggaggagtctgctggggaactgttatcttccttctcagtgttgctgtgggactttgttctttgatgtgtgccttcatgggtatttttagggaatataaggaaatgacaagctgggggttgatagaggggcaccattttaacacccgagttagcacttgataaaggcctagagttgtggttcagagccatggttgcacgttagaatcagctggggagctgccaaaaattaccagtgtctgagccccaccctgaccagttacacaagactttccggggtggggtcccaacatcagcagcctcagagttcctccaggtgactccaatgtacaaccagggcaagagcgtttaacccagagcagagaaggggcttaatttttcattcaagttctagtactgtgtggccttagtcatgtcttttaatatctttgtgccttagttgtccccattttaaaatgagaatggtaatgcccactcttgctcagatcacataagaatattgtgggataaacaaaggttcatgagaatgaaaccaccaaaagatgtgtgacttcaagcccagtagtgcagggtccttggcaggccctggggtggcaggcaatgtaattcattcattcacaaagaccctgaacagctaggaccccctgtgaacactgcctgctccaggctctggactagggagaagagacaaagctgtcaaagatgctgggcacgcactacttgcggggtccctggagtctcttgtggtcccttttcaccctgggtgaaagataaacagcagaactctacaatcatacccaggtggacaattcagtgagaaaggagtggggaggcaggaggcctgaggggtcaatatgaggcccatgaggtctgcaggcatggctgcacttacaagggaccgtgtggacaaatggcttcgtggaaagtacagacttggagagtgactaagcgtgggctctgatgcactactttccaatttaaaaacaccataagagctgctcttgccacaaaaacaaacaaaacaaaaatgggtaactgtgagatgatggatatgttgtttgcttcactatagtaacctttttactgcctatatgtatcccattgcatcatgttgtataccttaaatatacacaaaaacattttttgaaaaataaaaaacaccataaggagaaaaaatgtttggtctccagagcaggctgacgtcagtttgaatcccagccctgccactggctcatagtcatgggcaagttacacaacttctctatcctcagattctccatctataaaatggggcagtaataggacctgccttataggaccattgtgataactatgtaaaataccacaattaatatccttggctcagtgtctggctcacaaatagcagctgctgctgttactgttttacatataaatatagatatcaaaatagttatagatacacacacaagtatatacttttttgtaactgatgaaactcaggtcattataagctgtggcctaggctcatccaaagctggcactgcagggcttctcagccagcccctgacctgccacctgaggagaccaaggcccaccctctagattgcaccttcatcactcacaagggacagatgttaaccaagtcatctctgagggccttccatctctggagatgctgagattctggtgccaaggatgcttggctgaagtcagcagtggtgtgggggactgggctgtgggaatgctctgagtcacattctacaacctgtcttcccatgttctattttggtggtgacacagtcacccagaccaagaatcttggcgtcatcttggagtctcccctttccatcaacccttacaacccaccacttagcaagtactattgaccttcacaatgtctcttgtgtcactcctgtattggtcagctattgaggctgaacaaacaaccataaaaatctcagtggcacgcagcagtaagcgtgcatgtagatgatgtgtgtgcaggttggttgggggtcacctgacctaggctagacttaggtgaggccctgtcgcatatgttgcccaccttctccctgggaccatcaggctagcccagagagagtcttcttaggatgacagaagaaacatgaaagtcaacataaatatttaacgcctcacatcagaattggcacaccatcactcctgcctcattctattggccaaagcaagacatatggccaaaaccaaagacaagaggtaggggaaatatctttctgaatattatttaagctaccccagattcttatctttcagctctcagagcgctgaggttttaatttcatcctgcctggatgcttgcagtggcctcctgtgtggtctccacaccttagctatattaacctttctgttgagcactggtatgactgtggtatttcatggccccatccccaaaaccttccctagcgaccatcccatggaacccagctccttggttttttatactttcttctcttgtatcacagtgatgaatgaatatgtcttatcttagctcctagtgcagagcctgtcacacaatggggcaataatatttttaaggaggatgaatgaatgaatgaacgaatgaatgcctaggcccctcgagggacgggctgtagctgtgtagcccagtgctggggcgctagcccacatggtcctctgttgccactgctgatgatgtgtgggtgggcagtgttctggttacccccagtccaccacgcagagggcatgacttgggggttagcaaagggagatggtttagccacagggagttaagtggaaaagtgctgagtctggggagggtgtcacctcccgttctacctcatcctcccacatcagcattgctgtcagtgaaggaggatgaccagcaggtctgggcaatgcctagaggcaaggaagctgtgtccccaacctggggacacctgaagaagaggtgttatggccccaggtcagggtggtcccagccacagagagtgcaatcacgcacccccatcctcatttaaaacatggggtttgcctgctgcccaggagcagccccaagacaacagatgctctgcacagcagggtggcacccaggcccctccccagccccgggaggctgacgcggtctctcatgcctccacagaaggacttcacggtgcgcgaggagctgcagcagcaggacgtggagcgctggctgggcttcatcaccttcctgtgcgaggtcttcggcaccatgcgcagcagcacaggcgagcccttccgtgtgctcgtgtgccccatctacacctgcctcagggaggtaagagacctgccgcctgtgccccctgcacagccagacagcaccaggtctggaatgcgtctcagataaccgggacaaagctgtgagggtaggctcacttagaaagggacccatccgggccaggcacggtggctcacacctgtaatcccagcactttgggaggccaaggcaggtggatcacctgaggtaaggagatcgagaccatcctggctaacacgatgaaaccccatctctactaaaaatgcaaaaattaaccaggcgtggtggtgggtgcctgtaatcccagctactcgggaggctgaggcaggagaattgcttgaacctgggaggtggagactgcagtgagccgagatcgcacactgcactccagcctgggcgacagagcgagactcggtctccaaaaaaaaaaaaagggggcccatccttcagcaaagagatgtgcaacagcagtcacttctgctccccaaagccaggtctttcttcgttgggtttatataaagggaaccagcacccccttcccccgtggggtgttgtgaactgaggctccagtcattcccaatcgggagcactggctgcagaggggaggcctatggtaagtgttgtctcaatgagcgatcttggaattggattggactggtttgccactggattatttattctatgaaaacatattttcttctaaatttcatctgaaaaagaaagaaacaagaatgaccaaggaacttttgagaagcaggaatttagcaggtggttgcactgccagatattataactcactttctacacccctctggctgctgtcaggggagagaattgaaagggggcaaagtggaagctggaagccgagtggggctgcttaggctgcgcagcaagaggttggtggcttggaagacagcctcggagtgagggcgaagagcacgtttaggctctagttgaatttctgagttagagccagcaggactcggtaatgtgagttggagggaagggaggaggggacatgggctccccgtttaccagcctggtggccccattttctgagatggaggatactggatgagaaatagaatggggatgaaaagcaagagtcagttatgtttgagtcgcctgttagctgtccctagggaactgcccggaggttggccgggtggaagggtctagagatcctgaagaggtcacgcatggaggtaggggatagagggttctgggaagtatcgatatgcacctggtgctcaaagctggggaccaaatggaaccacgcaggaagagagtatagatggagagggagaggaagggggcgtgtaagaaccctcacagcagcccttcactgggacctggacgcctcccccatgttgtaccctcccaccaccggcaggcctctgcaggggctaccaggacacaaggaggaacagcctcctgagaatcaaaggaccaggacagaaaagtgtcctgggtttggcaacaagcaggtcacgggccctgggtgtcagcggaggtgaggacaggagtgtggacacgtctttcgagaagtttttctgtgaatggcagcagggaaggagagctgtggggtcaaggggcatctttatggttttgaaagaaagacaataatagagcaatttaagagaagggagggagtgtatttatgagtgtttttgaagcatccgtttatagaacaatagcatgctcattccagacaagcacagagcacacagttctctctcgggtgttttgtaaacccatgagcctctgccactccatgtacccaaaccacatttcttaacaaatgcacttgaaatcagatttgtttcgcagattcagacaatggcctctcctgactttgtttcactctcaaagtgccttgagctcagaatgcagctccaggagggctggcagctctgctttttgcaccctttggaatgacatggaggctaggagcgggcctgcgtggcctcttgggtcctcccatccttgcctgcattgccctgtgccctggacaacccacctcgagacagggagcagcactgttctagggcagtgacctgaattgccccaacacgttccctctgcgtgatctggacacctcctggtgttgtcgtcacctgctcctccgagagggaggcaaggctgtagccgagcgccggccctggctgctgggacacttttaacaccgcctgaggtagtgcaaatattccagtgtgagatccggaggtgccaggagatgtgtgcagacaagaacaaagagccacgcctaacgcacacttgttggatgcattcaaattttcgggccagtttgacaaacacagacccatccaatgctcatggtaaacttgaagaataaataaatcacctatggtcttctccaatttgtaaaagaagagggcagagccccatgtaccaagctaactagggccgggctgcagcagggttcacatcctggctctgttgttcatcaactgcaccacgttgggaagcatttacctgctttgagctttggcttcctcatctgtaaatggtgctcatgctgctttctctgcaaggtgcagggagggtggcaaggcatggagagacagctaagtgcactagggacaacgaggccggaggatggaaggaagtgcccggggcacggcgtctggcagagagctagttgtcatctaggctgatggggcctaggggctgagcacatgcctaatcttaaagggctacttgggctgagtgtcctgcccagggacaaacagctggtccatgccagagctggtctggagctcctgaactccaggtagggctctttccaggagaaatcttggcttccctaaaactgggccaaaagaaaagatggggacttaaaggggtgccctacggatctcaacaatccttgtgaacagcctgttgcctttcgcagctccgtagggacccctgaattcttcaagccatttgctgcctcataaccaggcttgacctacatccctaaagcaggttgagccggcttatggaagtttccagagccaaaggcacagctgcagccccctccatgctggaaaagcttaggctttccccctggggccatgtagatgtctgaccccaaatccacagcacccactttgccctgagatccccccaactcccagaaccacccgcaggcccacatttccagctgcccactacacctgtcccaggtcatacctcaggaccctccaaaaggatgtggtcagaactgcaccccaagaccccctgctcagtgcagctctcatgcaggcccccacccatgctgcctgcctccctgcagccaggtagcagccccagaacccacgccacggcctttccgcagtcaagtcactcactccatcccctgcgtctgtacccccggggctcccctgcagtgctttccttgctgcttctgagtaaaacccaaacccacaggccatctctgagtgaagggtcttgctgagggtgaggacaaacctaagggatagatgcaaagtcctcaccatccagcccgtctgggggtccttgtgctcacagaggcccccttcattctgaggtccaagcttactcggtccccacgctcctttagctcaagcatgtgcttagtccccaggcgcctcagcctggaggacacccagctctctgggagtccctggggacatcctttcacaccctgacctcatcaaattaaccattctttaagttactcaagcttgaaactttggagtcatctctgcctctctgtcttcctgtccctgacacttcttcctaggcccagtttgaagtcaccttttctgtgtggcaccccctcagcacaccaacagcttcctcctaagggacctggaagtgtcctctgtccttactgctccatcctcaccccagcctcttcacgttgccttgtagcagtgttcagtaacggtagcagcacatctcactgcatggacgcctccatctcaatcgagtgcctcgtgtgttcttttctcttttaactcagacagcactttgaagattatcatccccatttttcagaggagagcagagaggtcaggcaacttgctcagggccacacagccaccaagcggtagaatcagtcctggaatccagatctgaccaccccatttcactgccttgcaggcagagcaggggctactctgtttgttttcttggtgcataactcagcacctatatggtaggatcccagtagatcttggtggaattgattccatttttgccccaactaacatgccaatcagagatccttcttccagagatgaaaaagaagaattttcaatgtgtgcttttcttgtttaagaacaaatagtttctgccgaggtggttttcaaagtgattgaagaagattattggtcatctgtagctgcaggagtctccttgctctgctatttacaactcatatttgcttagcaagctcttttttattttttaaatatttttgaatttctatttttagttttactgtggtaaggatactgaatatggatctaccctcttcacaggtttctaaggataaagtacagtattgtatccatagccataatgttgtgcagatctccagaacatatgcatcttgcataacttaaactttcacctattgattagcgactccccatctgcacttccccctagcctctggcaaccactattcgttgcttctttgaatttgactattttagatacctcatgtaaatggaattatgcagtatttgttcttctgtgactggcttatttcatttaataatgtcatcagagttcatccatgttgttgtatattgcagtttccttctttgtaaaggctgaatagtattccatcgtatgtatataccactttaaaatttttttcttggaggttaatatttgtacatatttatggggtacatgtgatattttgttacatgcatagaatgtgtaatgatcaggtcagggaatttaggatatccatcacctcgagtatttatcatttctatgtcttagggacatttcaagtcctctcttctagctattttgaaatatataatgcattgttgttaaccatagtcaccctactgtgctatcaaacattagagctgattccatctaactgtatgtttgtacccattacccaaccactcttcatctccccacccccacccccacccacacacacacacacacacacacacacattgttttatccatttatctgctgatggacatttgggttgtttccgtgtcttggcttattgtgaatagagctgcaatgaacatgagagtgctaatatctcttcaaaatcctgatttcagctcttttggataaatactcagaagcgggattgctggatcatatggcagctctatttttaagtttttgaggaccctccattttgttttccacagcagatgcaccattttgcatttctaccaacagtgtacaagggttctaatttctctccatccttaccagtttgtcttttgttttttttgctcacagccattctaacaggtatgaggtgatatctcattgtggctttaattaatttgcatttccctgatgattaatgacattgagcatcttttcatatacctgctggccattttccatgtcttctttggagaaaggtctattccaattcttagactagttttaaattgagttattaggttttttgccattgagttttaggagttccttatatattttggacattaactctttatcagatgtatggtttgcaaatattttctcctgttccatactttgtctttctctctgctgattatttcctttgctgtgcagaagcattttagtttgatgcaatcctacttgtctatttttgcttttgttgcctgtgcttttggagtcatatccaaaaaaaaaaaagtgtccagaccaacgtcaagatgctttttctttatgttttcttctagtagttttacagtttcaggtcttatatttaagtcttcaatccattttgagttgatttttgtatatggtatgaaataagagtataatttcttcttcgtgtggatatccagtcttcccaagaccgtttattgaagagactgtcttttccccattgtgtgttcttggcacctttgttgaagatcagtcgactgtaaatgtgtggatttatttttcgactctctattttgtttcattggtctatatgcctgttttcataccagtaccatactgttttgattgctgtagcttcgggatacattttgaaattaggaagtgtgattgcctcaagctttgttcttcttcactcaagattgctttggctatttgggctcttttatatttccaagtgaatcttagaattgttttctatacttctgtttttaaaatgcccctgggattttgatagggattgcattgaatctgcagattgctttgaatagtgtgaacattttcacaatattaaatcttccaatcaaagatcaggaataacacaaggatccccactcttaccactcctattcaacatagtactggaaatcctagccagaacaattagacaagaaaaggaaataaaaagcatccaaatctgaaaggaagacataaaattgtctctgtttgtagatgacatgatcttatatatagaaaatcctaaagactccacacacacacacacacacacacacacacacacacacaactgctagaactaataaatgaattcagtaaatttgcaaaaaacataatcaacatacaaaaatcctttctatttctgtgcactatctgaagaggaaattaggaaaacaatcttacaattgcatccaaaagaaatacttaggaatagagtcaaccaaagaagtaaaaaacttgtacactgaaaactataacatattattttaagacatgaaaaaagacacaaacaaatggaaaaacatcccatgagcattttataatagcattctaaggacctctttctcctgcccaggtcctcagcctaactgtgactatgagggctgcacacacaggaggggtgcaattattgtttatggcctgagcaaagggttgtcatctccccatcagctggtatctctgagccaacatgccaggctgtgggtctggcttgtctagagccttcattccctgaccctacaatgctctccacctcctccgcctctccgtgcctctgtgatcccgtggtgttgttgtgaggctcttctaggttatcattgaatgcctctctctgagccccttacttaaagtcctttgttgaaaatttctctggcaggggaattttcttttctctcctttttttttttgttttgttttttgattttttctgagacagagtttcactcttgtcgcccaggctggagtgcagtggtgcaacctctgcccactgcaaccttcttcgcctcccgggttcaagcgattcttctgcctcagcctctcaaggagctgggattacagacgtccgccaccacgcccagctaattttttgtatttttggtagagacggggtttcgccatgttggccaggctagtctcaaactcctgacctcaggtgatctggccacctcggcctcccaaagtgctgagattacaggcgtgagccactgcacccagccaagcaggggaattttcaacaaagttccatgcgcctgttttcctccacttcctctcatcctctctctcccctgaacatcccacctttcttctctccatccaatccccccagctcatccctacccataattccaaccctcctgtctctttggagtccagcagccatagccagaggtcaggagtggagtaaaggaggaaggcagggcgctttctgccaggaatctcccatctctctgtacccacctcctgatccccaccaacctctccctctggttgccccctggctcttctcccctccaggccccagaaatcccatctgcccctccctgccctttccaagggaagggcagggagagggcagatgcctctgaggggtgtctctgaggggtgcccccaagggacacaactggctgcgctcctagaggaggtgggcaggcacaggccagggaggagaacacagaggccagcaagtcaggcttctcaggaaatgaaattgctctgtgcaacaatgagagagccactttttaaactttttgcgtgagtgtgcattcaattgctcacattgttttggctccaggggaaatctgacctcggaaaaggctgagatgaagcgggtgtgggtggagagcctctgctatttcacagagtcaagcaacacattcttcagaggcacctttccaggcggaccattcctcctttcccaagagcagggcattcagctacccagcagaggccagggcaggacccactttggccagaagtgaccaagatagtctgttccccaggggtaacaatgaactctgatggggagcagagatttgctggctggatccatggggaattatcttcagccctgcaacttgagaagcttttactacattacaaactctcagaccccttcttcaaccaattaaaccaaacttcctgaaaatggggtttgctcggcagggatatgtaagctttccaaatgattctaatgtccggccaaggttaaggaacatagtctcagcatcctaggtgcattcagtgagcatccactgaccagccaaaaacccttgggtgaggggcatagccttaggagccagagagacctgagtttgaatcccagctgtgccacttactagccgtgggactttaacctcattcttccgtcttttgaaacctcgattttcttatctgtagcataggaatgagaataatactcatcctgtggctttgttttcaggcttaaaataagcgaggtgtttctgtgaagcaagtggcatatgacagccttgcagggaactgtcagtttgtgtgttgctgttgaatacaaaccgtgttccaggcatggctcaagagaaaaaaaatcgcaacacagtcagccccagaaagtgaggtccattctcccaacggggcatccaaggcctccataagcaaacacaacccctttctccagccaaactgctccacttgtatttccataggtggccttgcattcctcccaccatgagaacaatctttctcctcttcttgcctggctcttgcccaccttcagggccgggctcacttcccaccgcctcctcaccctgcctggattcattcctcttacaacatcctatagaactaatgtccacccggggctgtcaacgtctgtctccagatatgctctttgccaggtggctgtattaatgccttgtgaccctttcttggttgcttttaaatcatttcagtctttcgttgctacctggggacaggctaggtctcatctgtcatggaaccccggctgcatgttgctcggagtctgtgctcattcaacaagcaatgatttagtttgagacaatgcttcttattgaactgcgaagtttcctagtagtaccagaaggagggatataagttgtgatccttcagcgaagagcttgcaatcctcctgaaattaagcagccatgaacacttatgatggattgtaagctggatgaatgtggggaaatggaatggggaaggaggtggggagccgccggggacaaagggcaggggagctggggcttaagggaaagtggattgtggacaggcatgggggaaatggggaaagcctccaggaaggagcctttgagccaaggcgtgggggccagaataagcatggcccatctgggtggtaaagagagggcccgatgagcgagccgtggccagctccggctctcaccagaggtgttctagtgaatgcaggatgactccaagaaccttggaaaggttttaagccagaaagcaacaccatggaaggaacaaaggagcattcctttattcattcaacaaacaatgagaaaaatgctacttccttattaaactggaaagtctcctggacacattgcttgctagaaatgtgctgagataacaaagtcaactaaatctggagcagtctctagccagaggagcccacgggtaactcagtgcccggaggagtgcagtgctccaaataaagcgtgggcaggagagggaaggtgggagcccagatggaggaagaggcgaggaggcaggagagccacctcaaagggcatcccggcagagagcaactccccagctcctgattgcctttaaatttgttctgactgtaacggtcaaacaaaaagacttagcaggaagtgaagggctagaatgcagcttgaaaaatcaggagaacctttctgcatgaacagtttattccagccctaatcttaggcacagaccccgcctggaatgttcctctgagaatgtagccttcctagggccaggtacccagcccctgggcactggcttagcatcggagtccctgcagggccagcagctgctgctatgaataccccagcttaagcgaccattcctgtaacctccgccgaaataacttcccacccgctttgtcccctccagagctttcgttcccctcttccgctcagcacacacagtgaagttaactcagcggggtgacgccgacctacccagacccccacgccccaaacatacacacataaacacacggaagcggccccatctgaagctgcctggatccttgacctcctcaagatagaactggagtctcccacccaccccacctccactcccgaccctctccccagcccccaccctttgactgttctgcttccttagccagactctgcaaactgaaatgtgaaatttgaagccagtgttccccttagcaaccatggtaacacaggatctgatagagagcctagagttataaaaataccagcttccaccagacactggtttccaaagggaaaccagtctccaagccagaaccgtttttaaacagtcttaaaactcaagagatttctaaaccaatctcaacatggctcaggaggacatctctttaatcctgttttggaaggtggtgtgggtgcaagctttgggtattttctctgaaatacagagattcagaatgcatgtgctcacgggggaattaactagccttatgaagggtatatagcagggagcagtttttcctaataaacatcaactatttggcattttttcatagattgagctgccctgctgacccccagtgaaatcttccttccagttccctcccggggagtcctcagctccatccatcctcctaattagggagagagaatgatttcgcctatctccccttgcttgaaaacaatttaaattcacaaaaccattttccagccggaattctactttaaggcttaggtagggaggtaagagatggtgatgtcaaaacttttctgctcaggaccaacaagaaaagtcctacatccctgtccccagccctttctctccccacagacgcaccctcgggcatgggcccagcacgagctataaatccctgttctctgcgttccctgcagagggcacaagcctggcgagtgggggcagtgagggcagtagggggactctccccaggggaggggcaccttcccagcccccagccccgccttcgcagccctggacggcttgccctcccatctccttcccccgcctgctcctcctcctccctcttatctcctggggccatgccttgtaattttgaaaaatcttctgactgggtaattaatgtctgaacttcaagaggcccctgctatctgcagagctgagctgaaggtgggaggggaccggcagctgctgaaggcttggaggagggagggggtgcagattattttttctgagctgtttaatggacgggactggggaggatagaatcgtaccttgccagagttgtgggtacaagatgtatatgtacacaggcacaagcatccgtctagatttttaaatcctttggggtaatcctttggggttaaaatcacacagtaggatgccctcctgctcacacaccctcaccgtcccttagcagtttcccagcaggtggatggcagcaaacactaggggagccaggctgggggactttctgagtgcaggtctggttgggaggactggttgggagggagggacagtgacttacacatttcagagatcataaaccgggcactgggggtgcaaaaaatggccatcagttactccaggtaactcagaagtcaaaatataagcctgcctgtttcccaccttaagggaggatccaggcaactctgcagacgtctgcagtgcccccgacctccgtgcttcccagagtgggcccccgccttgcccagcctccgtgctccagcacaggtgccctccatctagcagttggggtgccgagtgctggacccactgctaggccctgggcataagcacgctggggtccctgtcctcacagagctgctgtctcctggggagaggaggagcaaacggtgccctgcactaagagccgagggtgaataaagcacacacagctctccaggacccctgtggatctttctccaaccgactccagctctcaggacctgtagctcaaattagcattgatgatatccacctgctgccattcttgccttcagatgtgaatgatgtttagggaactaacttttctcctcccttctgtccacctcaagaccaagccaggctccagctccttcttgatggctctgctctcattgccgccagcactgaactgtaggtcagagtgtgggcggggccaggccttttgagaaagaacctccaggatcagccttctcttgtagccaggaagaggaggggaatgctaggggaagaaggtgggtttcggaggcagacagtcttctgcagcttaccctctctggcccttgggtagatgtgttaattatttttgtttgtttgtttgtgttttgagacagtgtctcgctctgtcacccaggctggagtgcagtgatgtgatcttggctcactacaacctccgcctgccagagtcaaggattctcctgcctcagcctcctgagtagccgggattacaggcgtgtgccaccacacccagctaattttagtatttttagtagagacggggtttcactatgttggccaggctgatctcaaactcctgacctcaggtgatccgcccaccttggcctcccaaggtgctgggattacaggctacaggcgtgaaccaccgcgcccggccagatttgttgattataaattgacttcctcccttccctgtagctcactgtctgagaggtacaccacccccaaaaaacaaagacatgaaataaaaggatgggttcacagcatattttatattgtataaactgaagtgctgcttactgggaaaaaatgtggaagaacacagtagaataaggctcaggaccttggttcactctctgggagaaggcccttcttctaggtgcctgtccagggctctgctcagaagtcagtttctcagaccccccccgaccacgccccagcctgtccccccaccactgtccccagcctgactgccttctcttcattgccctactagtgcctggcttggagttttctttgttaatcgcttattttctgtctctcaactagcatggaaactctctcaaggcagggaacgtgtctattcacagctgtatccctgtgcctagaatagtgcctggtatatagcaggtcctcagtagatacttattgactgaattaaggaagtagagtgcctagactgagcaaagccagagacaatagtcagcccttctagaattcatctggaatgatttctcagtggagataaatccagaacccttgaaggggcaatgtgagtgagcagagtggggctggctggtagtggtccctggagatgagctcagaacgggaaagggaagagaaacaccccccatcaccccagcaagcaagcccaaaaggggcatttgtgcccacactgtgagtgaaccagtgcaaacagtgctctcagcctgcgaagctgcctctgttctgtccctgcctttggttaagtggccttttctcaacaaccctccaccgagcttcatatgagattcagtctgtccaaagtcagaatcccacaaaccacaatctttaggagaagtcaggaggagcttctagcaaagctccctggaccaagagcccatggggaagggattgttgtgggggcctgggcacctgctgtacactgtgacagcgctcagcagggccctcctcactgcccctcccatgaggaacggaggaagttaggagtatgtgcagggggcacgaagggtgggagaatggagtgggtgggaaaggacacccacagtcacagaccttgaagatgacggaaaccttgacaattacagcagaattcacctatggagcaacatgcccagtaacaatataacgtgagccacgtgtaattttacatggcctagtagccacattttaaaaaactgaaaagggaacaggtgaaattaattttatgctgtctaatatatccaaataatcaccattttaacgtgtaatcaatattaaaaagtaccaatgagatattttttacgttcttctcttttggtacgaagtctttgaaatccagtctgtagtttacactgaaagcagctctcaatttggactcaggcacatttgaagtgcccaagaccacatgtggcctgtggctattacgctggaccaggcggtctggaggcagcttctggaatcctcaggcttttggagcagttctggacccctaaagtaactggattcccaaagtctcaaaagtacttttcatagcctctcatagcaccaggcagcaaaggggcaccatgaatactaaaacctcaagctcacagccagtgtgcgtgtgggggctgcctggctggagagctccctgcagggtctggaaaacgtggtccttcttttttttttttttttttttttttaagacagggtctccctttgtcacctaggctggaatgcagtggcacaatcaggactcactgcagcctcaacctcccaggctcaaacaatcatcccacctcagccccccaagtagttgggactccaggtgtgcaccaccacccccggctaattttttgtatttttagtagagacggggtttgccatgtggcccaggctggtctcaaactcctgggctcaagcaatcccgcctcagcctcccaaagtgctaaagagggggaaaaggtaggaaagaagaaacacatagaaagggaagagaagggctgtggcaggggtggccagttgcatgacagggataagagaatccacggatagggacacagtgctgggcagggctgggcagctgccaccctctcctcacagcagctcgacagaaatcgtggccgagtgtgtggaaggcacaattagctcattcttgcattgccccttgattacacaggactaccatttctgtaattaagaccttctcccttactcagaagtattgaaacatgaaagtatttgctgaatctggtttcccagggttaaaagccagacttaggaaacgcaaacacacttgtggaaatgcaaacacacattcagtaattaattatcctttaattaaggccaaaaccctgctgaaaacaattagctctagaaattgaacagtaggtacagctccactttttgctgattgttctttcctgatagccaggaagtgctgagtctggggggcggaggtggtagggaatgaattagtctgccgcttttggtctggactggaccaagctctactttttttggaaatgttagtcagaggagagtttgaggtgtggggaagggcaaagaggatgtggtttgggcaaggggaggcgagaggctgccccaggcttggatgcatgccatgggaagtctcagaagctcctgctggccacacagaggtggcttgcctggctggagtggagggcgtgggccagggattagctgactggaaagcaattagatgaggtgcggctggctgggaaaatacctggaatcccagggccagagttgagacttgcttggctaacgctgcaggcgggaggcctcgtggggcctggggagtggaagtgcccaccagtgagggtgggagggtagccgtgtgggctgcgagtcttggatgcctcttgctgatgcggagaagtggatgagtacagattgtgtgggctcggaggtcctgcagccctctgggaaagatgccctctttcccatttcctctctctaaatgcccccctgcccccgccgccctccacctctcctcagactccttggacgttcctaaagcctgcctagtcccatcagatcacctcacccctttcctaggtaggaagatgtaggtgcacagtgtcccccttccggggactttcacattttgaaaggaggggtggggagagaaaaatgtgtggcccaaaggaacaaaaagggtgcttgggatttgggaggggtagggaaggtcactggcgccaccaaactctccccagaaaacacctgcatgcttaaaagcttacctagaacccccgaagcctggcctctggatggggggcttcccaggtaagagcccctgctctagaagtggaatgttaggttttcatacaggcaagagggaaggtctttattggtcagaggggccttccagatcaccctcaaagcaactgtgcaaaagattccaaatgttggcccagcgcagagcaggactctctcagattccaaaagcccctgacagctcattttttccccagaagggaccccagctcttgcacaaaccccttctctccccttccccctcctttcccctcccctcccctcccgttctcttcctttcccttctctctgtagatgagggtcggcaaatgtctggtatgaagggccagatagtaaatattttaggctctgcaggccaagaggcaaagccgagtttaaccacatccctgcgaggtgtagggcgtgagcagcagcatgtaaccaggagagcaagcgcctccactctgtcttcatagcggaaaaagcagccgtagacgatatgcaaatgactgagagtgactgtgtgccaacgaaaccttatttatggacactgagatttgaatttcatataatttgtatatgtcacaaaatattctttgatttttttccccaactactgaaaaatggaaaaaactattcttagctcatgggccataaaaagcaggccatggccagatttggccggtggactatagttcgcccctccctgatcccgctgtgtggttctcaagtgggaaacgctcctctcctccagatggtttcaatgcacattaaagtttgagagccactgtcataaaggagaatttgcagtttcccaggtgatgctgatgccgtcattagggggatcccacactgaatatgcccaatctagtctgaccttcaccctattttacagatggcaaaactgaggcccagaggcaacgtacctctatcatatgagcccagggaaaggcttctttgtctcaggatgcagagctgggtggttttctatctctagccgccttcagcgatctgccctgccagctcacactgcccaaggctctagccgagatacaggaaatgtggatgtgtcccccggagcccgagagcagcagggctgcagtgagtcatttcccgtgagtggagctggcatgcgctgagccttcctcgtgctgtcagttcgctcccttctgaccactccaacctgcgctttagaggaactccctgccagcttccgggaagcgaaaagcaccctctgtgagaagggaaaaaggaaagaaccaaggtttgcgtgtcagacttgcgtgatttcaaatcccatgttcgtggtactgcctgggacttgaaacaaattccttcacttccttgagcctcagtttccatcagtaaaatgagaaaacagcccctgcctctgcggggttcccagaagacctggagattaaatctgtccagtgtcaggcacacggcagggaatttttatggtgtctttattggccatcctggcattatgcattagccacaagggtacccagcctcaacctcaaaagccacagaaaaaggccacctgatcctccagacaacatgtgtggccatggctgtgctgatggtcttacagaggcagtcactgtcctacactcctgagacattgccattgacgatttaggttgtgctgtgtaaggctcatgtacttgggtcccttggtggccttcagggtctgagaaccctgaaattgtatgcagacatctgtgaacctgtgcagaggtgcatttttctgggagaggtgcagatttttcatcgagatcctcaaagggatccatgctcccaagaaagctaaggatcccacatctataagcacagtgcagaagggagccccagactttcaaggcatattcctggatttgagaatcagctccctgacccccatgagtggccttgggcacactggagatcatctgatctcccccctctggcgtggtccataaagcagtgatgggactatgtgaggatcaagtaggacatgtcaggccaggtgtggagaggggactgtgtgggagctgtcggtcatggtcccttcccaccaagccccccacctgccctcacccctgacttggctgccccctactcaacctttgggtttcctctgcagagaagcctgccctgatcacctcatccatccaaagggggctccctcccagctccctgtttgcatttgtcattctacccctctgccccccactgtaggtggcctggggacaggcaccgggctgtttggtccccatggccccaggccctctagcccatgaacatttgctgcaggaaggcacaaatgcatacccccgccctaggagccactgccttggagcccacccacctccaggccccacctccctcctcccccagcagctgcttctctaaagaggcagctcccactgtgctctggagcattcaagatcccagcaacaaagtcagagttaaaaagtatattctgtgcttctcctggagctgacgtggtcccatcaggtgccccctcttgagcacagccagcagcccccagagaggccctgggctgcccttcagggtccccatgctcagcctggtctttttcaaggcctgattctaagggctgtgtgggccctgcttgctctgcctggaggacagtggggtcaccactggcatctaggggacccctccaccaccctgctgccccctaagatgcgtatggggcaggccctccagcttctcacacctcaactccaaaggcctgggcgattatgaggcaccagtgagtgagatccccaaccaaccccatcacttcagccctccaggtcccaacatcccaccaggtccccctggactgccagcacctgccattcccctagaggggcaaggaagcagggtgggaagccccaggagactgccgttggtcatgcccaggtaaggattagccaggccttcctcctccactcctctcctctttgcctggtgcaggaacaaccagctaggagtcaggaaatctgagttctggtgctggctctgctgccacccaagctgtgcctctggtttcctcctgggcaccgcacatagatgccatctgtgagtgtgtcccctgcttagtccacatcacctgccatcagcctgctgagagggcgccggggcccagtgggacaccctgggaaattgtcagctactagtcctgcatccctgcccacatttgggctgtttgtcccttcccatcgcataaggagcggggaagggcaggaaactgaggcagccagggtttgacagcaaagcctgcactgcctggcctgggggcaaaggagtgaggtccagaggttacgagctgccaaggactggggacctcatctttctcctcctggctcccatccaatgcccaggggctggggggtctcctttcccggggcctcccatacacacattggtaaagggaggaacaacagcctcatggtctcggatccaaatcctcatccctgtgctcacgagagcccctccctagagcaagggagcactggtgcctgcctcacagggtgggggcgagaagggggctgtctaaggcccatcaagcatttagcaggggcctggcacacatccccactcagaggacaccgagaccactgttcatgtcacatccggggttcaaattctcagtgctgcaggaactcagaggaggaggagtggcctgggagctggggagggctgaggtctgggctgggggaagcacctgaaggcaggggtggaagctatgggcctaggggcacctgagcctgggtgagcccagcccaaactgaacaaaggcgattagagctaagaagagggtctcagtcatttatggagcctctgccactcccatccacctgaagagacatttttctcagtggtgcccactctgactgcaccagaaacacccagagatcttactatacagattcctaggcccccacagccctacatagccctaaaatcaaagagtgagggctggatctgtttctctcctaggtggatccagtacaaacacagggctgggaactacccactggatgcatccctctccctgctcccagatgccctgagcccctgccccccaccaacctgtcccagcagccctgggcaactgggtgactgcgaggctaagaatcccccacacccacaccctccctggtgggaagggagtggggctgtctctggaactctgatttggttttgctgtccaatgccagaacgggggcacactgaggaagagagacttttaaaaacaaagtccgtcttccctggggttttattttaccttggaaaatagaagaactgatttttttttttctactttcccccaaacttgctccctatcagtgtccctaaagtaggaagagttctcacttctccaagtgtgtagtcttggcattaattaaaatccagaaatgacagcaacaaagcacctgctttttcttcctgcttttctcccaacaccccggcacatcaacagcccgtcagcttgtgggtagactcacataggagctggagcctacactgaactttcatcccaggcgaaatgcctatcagaaggcaggtgcgctgccttcccaagccagtgccctcctagagttgagcgtgctgggctgcccacgcctcacgtgagcctctcggtgcagtggccgcctggaagatgtctcacctgggtccttgcacaggcagatactggagaaaatctgaggaaatatatagattgatttttgtccgcccccctgaaacgagtcccctttatagtcacacttcatagaaagcacaacacagacagcatgtctgtgcttgaggctgtggctgtgcacacttgggtgggctcaaagtatatgcattactgcacaacctttgtctccctcggggccaacacagagtttagtgtaggagccttcacttaggcactgtgttcacctttacagccttctccaacacttcatttatttggtggccccttaaccagaagcatatggagaagttgagggatttgccaagggacaggcagcaatagtgatttgccagggcaggccctgaagcctgtgttggtcacaggcagattcaagggcagcagcagcccccaaactctagatctgcatctcaggcccaggcacatctccctgacacctccccgggcctgcccaccggcccctcaatctctaagtgtcctagtggaacctgtcttctgctccccaagcctgcacctcctcccggagaaggacctccaggctgtgccggctacagccccgaggccatccctgactcaccaccaaccgccaccctgctgccagttcccagggtctgtgagcagcagctcttgcagattttcttgaatctggccaccacttttctgcctctccacggctcggctaggccactgtttcctttcccctgaattaccccaccagccctctcactggctcacccctcctgttctcagtctcaccctgccaccctctctctgagcactcctgactcacttttctccctgcctgtggtgtccttccctctcttcctctcctcaccccactctcctggctgtagcttcaaaggtttcttcccaggaagctgtccctgagcctcctctcctgacccaggtgagaacagttcttcccgtcactgaccccacagcacactctacactgtgccacttgcagcccactcagttctaagagccaccactgaccgagctcactgtgtgccagatactatcctaaacaccccacatcctcttctttaatccttgcaactacccttggcgggaggtaatattagtatcaccactttacaggtaaggaaactgagacacagaggggttgcctgtattgcacaacatgactggtggggcggctgaatcaggattagaatccaggcagtctcactttacagccttagttccaaatgctgatctgcttatgcaacatctgtcttccctcctagactcataaatctataaggccaggatctgtgcctccttgttgaatgagtgaatgaatgaaaagttgttactacccccttcagacaccctggagaagttggacttgttgtgctccaaggctttatgtcactggggggctgcatcccagggaacagaggcccttccgaatggcctcaccccagccagcagaaagccatgctttctttcaaatccaatcttcaggtcttccgagaggcccaggtggactcaagtgcctgtgtgagcagtgtgaagaaaagctagtctaggtagatgctagactagacctagaactaggtagaagcaacagttgctcccaggctgggagtggtgagtcttctggctacggaggtcagagaagatcagggaaggcttcctggatgaggctcttaccattgttcttaagggatctggtcaatggagccaagatcagaaaaggcatgctcagccaagagaattgtcagcaaaacccagaggcagataagggcaggatgcatccttagacctgtgaacagacgagtttgggtggattggaggtctgtgaagggggcaaggtgggaagactgtagggcccagagcagaagtggcccagcgagccgcctgaatgccaggctaagccctcatccccatgcagcctggtcagttgaacacagtgagaatgcacaggtgataacagaatattgactcacatgctcattcatccaaaaagatcatctcgacttagaaaaagagttgccccattattaaaatttatattctgctaagggtaaggctctaaagccaaacaaacttccaggtgccaattaacttctcttatctccgagtctcttagacttggcaaagagtacttaccaaatccctactgacaccctgggcagccccaggcccttttctcagcccaggcctgtctgctcctccaatgggtggctgctcctctgagcacaatgctaattatgcccttagcacagcccgattcttctctgaacagtaacagagcttaattgtctccggcccagctgtccctacccagttggtccttggttactgcattctgcccaaacccactgcagaaccagctgcactccctcacccaaaggatagccctccaacccagctcctgccacaaggcttcactccacccccacccccacccccaccccccccagaagatgggcacctctgtctggaaaccaggctactacaagtgttgatccttcttcaatacagcatgccaagattatcatgcaaaaaagaacatggtttaagcaaaggtttcttcaaaattccgtgcttggtggcagaggagtgggccagtgtgtcccttttctaagtcctccaatgacccttgctcgttatttatgccctccctgactcatgctctgtaaagtctgaggttggtaaaagccccctacatttaagagggcacctggttaatgtaggcatcccataaacaatcttctaagaagcttcttcccagtctcagggaactgtaggttggcatagccttgcagataatcttgtgcccagttggtgagcaagcaggggccagtggctggagcggcccctgggctctgggcatggggaggccctccttctgagctgatgggtggcctctgcagccgggccctccctgagcttccctctgggacagcagagaactcaacctctctgcctagggcagcgccctcgtggccccggctcagcccagctcctctagggaattgagtggctggactgtggtttagtcgcccccagggaagcttacccagaggaggaaaggactgtttcgcaagccaggcccggcgttctgagctggcctgtccgcccctggcatatggctgggcctgttaggaaatcaaggagacgctctgtctctttccagcaggcgccacttctgtcttgccactgctttgctcgattcaagacgctggctcgggggccaggctggtgggcaggcaggcgggcaggcgggcaggcccctctcccaccagcccggtgcctgggaagcgctcactgtctcctcagccggtgttatcccaggggtcccgcacctggctgataaggccaggcggctatcagtggccatctcgggtgggagggcagggtggctctcagggaaggattccagactgtttccttctggggctgagctccaacgcccttatctcctttcctgccaggcagggactcctcagcgctcacacacaaaagagaactccacccaagacgcacagcccctacctactggaaggtggaggaggctttgcctccggtttcattaaatctacctggttctcaatcgggggcagttaagtgtgcactcagctaatatcaatgtatttggtcctgccagggggtgggagggttggagagacggggacgttcaagtaatggagctgccttggtggctgttttcgaagctcctggacttgtcagtcaactgaaacgtctcttggaagagaaacaaccaggggatgggccaatgccaattacaagattcaggggctgcggggatggggaggtcaggcctcatgggactgagtagaacgagggtggtggggcctgagtgtgaaaaaccaggcctcgctcagccccgctcttggctgccttgaagcctgtgaggcaggaggcctggtgagtattattcccgtttcatagaacgcaggcctgtgggtgggagtgctagagggaatacgggaatatattatagaagatgggtcaacggaatccttgagaggtcagccgagcgcccattcctgttagcgcggaagggagagccctggcctcacagtgttcccaggattaatgttccgcctcagaagagcagcctacccccaagactctcagacttactgctgggcaatgctttccagaggccagggctggcctaggtgaccccacagggccttgttccagcccagcagtcgctgattctacaggcaagttactatgggaactataactttgaatttcctggctctggggctgtgaaaatcacaacctgaaccttccgttgatgtgggtttctcgattaatttcctgtttgattgtttactttagagagcggaaaatgcctttgcaggcagctagctccctccacggagacacttatcacaccctgcccccacagccagcaaggtcaagtccaggcctcaggtgggtggaggtaggggccagaagcaggggcagggactgggggaaggggctggagctgggggcagggaggaggctcagccagaagcagatggcagcctgagccccctgccctacccttctgcttgcccggggtcccagcctggtggatgtcggggctgtggagggacctgtgatttcagagacctgtgagcctttgaggggagcctcccacccaccccaagccccaggactggcccctggctgcccaaactatcccctgtctcaaggagctctgttgtgcagagtcagacatacagtgcagtccttcctggagagggtggcctcagtggggagggtcagagatttccccctaggccaggcactgctgactgggctgcccagtgcggggctgggcgtaactgctcttctacccttctctcctccatctgccctccccagggccctgcgctccagcagggagctgtgcccagtgttcccagtgaccataactccatcctgttccctgcggagtggggagggcttgcaggctcaggtgccgcctgcgagccaggagttctgatctcctgtgatgataaccacccatctctaggccatgggacactcggtagcctctcgagccctcctccccaccccagctacccagcccctagatggccctgaggccccatttataatgggggccctgaggcacggggaagggaaatggaataggccagagggctgtggactacccaggggatctgggaggcctgggaaaaactcccaacctcccagcacccctcccttatctaggtgaccgtatattatccacatcagggcagtttggagagtggaaaggatgcttttactaatgactttgagatgacaggtgaaaactggaactattccaggcaaacgagatgtgccatcaccccacctttggccggcctctccccatcagcctatttatgtgggcactcactggggagcaggagtgaagctatttttctacctacttgtgtgctcttggagaaatcatttccttccctgtgcctcagtttctgtagctgtgacatgaagagcgttgcagtggtgcctaactcagatcatctggtagaaagatcaaatggatctttaaaaacacacagagcacatagaacaaccactcaaaatatgtaagccaggtgagcatgaggattccgaaggtgctgttcaccctcagaggccccctctcaaaaggggaacctcagagctgccttaggcatttcctgttcactcctcaggagggatcttggactgggggcagtgagcacagaagaagcttccagaagggatggggagggcctaaaggggaagctgggaggcactggctgcaggcacagctgcttccctggagtctcaaacccaccccagggtcctggggattcctggctgcaggcactgtgaacagaactagcccctgtctaggccactagctggagcttggtccacaggagaagccgctggagttgtagccctgccttctggatccaatgtctccagaagaatttggtgtctaccctgagccccaaattatatttccagcccccgggccagctgtgggatgaagcatcccccatgtgacatccactgtcgctactttgtacggggtggtttgcaagcccggcaggaaggaggctaattattccctctggggcgcctggtccgcagctagggtgcccgcccgccttagttaggagggctggcagccagaccacagggcacaagcttggactgaaggccaggtcagaaccacaaatttcctgacatctgaccataaccaccataccaaggctccatgttagactggtggaaaagtggcatgggggcccattcccctctgctgaaggtgtctgcactgtgggcaggcaagagcgattaacataaaacagcactaattttgtagctttggtgccaggctaggcaacattagcatctacacaagcacctatatccatggccacaccagcccttcctcccacttcagagggcgacactactcttctttaaggcagatctatgtacttgatcctttcctcctttctgattatcctcttctcctgcactctggcacctcacctctacctttaaactggctcaagactctcctactttaaccacaccagattcccagaccattctaggtgaccctgtgccagtgtctttcccctagcatcctccccttttcttcttccataggcaagttccaaaaacaaagaaaagagggaaaggaaggaagagaagaagggggttggggttgggggtgggggagagagagagagaagaaagtacagaaattcattccaaagaaaaagaaagaaatggtgtgctctttctgtctgcacttctggacctccttcacactctccaaccctgcggggcccagcccaggcttccactgccccagtagcagcactgaagtcatcatggcaaaggtcacccatgctcttctaatcaccaaatccaggggaccttggtcattgttcgttttacttgacctctctgagctttgacactggtgaccttgtacttcttggaactcttggccctcatgacgccatttcctcctgttctgcttaactctctgaccacccttttcttccttctttggggattcctcttcctcctctctcaccctttaggcattgctgtgttcaggttgggagcccctgccgtcttctcttctcattccatgtgttctccaggtcacctcactcacaccaacggcttgactaatccctgggtgctgatgatcccagattaccattctcccattagtcatcttccctggtcatccccaaggaccctggactcagtatttctaacactgaactcattcactttccctaaaaccacctccacctgccttcccaatattgttgatggcatcatcacttacgcagttgaccaaaccccaaacctgggggctggccatcttctacctcatccttttcctcactctcacttctgcctcttaacatattctgcctcttaaatatcctcctcccttcctgccagccttaattcaagccaccccaattttgcacagcaaccttctaacggtccccctgcctccagtccaaacaccaccctacctacatctccatgctatgcaagataggatctttctaaactacaggtattactatgctactctccagtttaaaatctttcagtggctctccagtcccttgggataaaatccaaactcagtaccatggcatctagagcccttaaatatgtggcctttgccttctttataagcacattccacccccagcaccatatattttaggcatcttgaaatacttattcatcattgtactctgctagtgcacattttttgcttttttacatctttctcatgccatatgcctggagttctccaccaccgctattccttcttatgctgcaatgccatatacctagcaagtctcttgctttccccctactagactataaattataagtcttattgttcctcttgttatccctgtacttacgtagcatttaacacaccatagatatttcataaatgttgccgagtggatggatggatggatagatgagtagatgggtagatagatggatgaaaggatagatggatggatggatggatggatggatggatggatggatggataggtgaatagacagatgaatgaaaggatggatgggtaggtgggtgggtgggtggatgaatggatggatggatggatgagtaggtgagtagatagatggatgaaagaatggatgggtgggtggatggatggatggatgaataggtgagtagatagatggatgaaaggatggatagatgggcggatggatggatggatggatggatgagtaggtgagtagatggatgnnnnnnnnnnnnnnnnnnnnnnnnnnnnnnnnnnnnnnnnnnnnnnatgaatgaaagaatggatgggtggatggatggatggatggatgagtaggcaagtagacagatggataaaagggtggatgagtggatggagggataggtagtggccaatacagacaaagaataggtaaaatcagttcaattttgtgaaggctcaggttgacctgtcaccagtcaacacaattaaaaattatgagctccagccggacatggtggctcacacctgtaataccagcactttgggaggctgaggcaggcaaatcacgaggtcaagagatggagaccatcccggccaacatggtgaaaccccatctctactaaaaatacaaaaattagctggtcgtggtggtgcgtgcctgtagtcccagctcctcaggaggctgaggcaggagaatcgcttgaacccgggaagcagaggttgcagtgagccgagatcacgctactgcattccagcctggtgacagagcaagactccgtctcaaaaaaaaaaaaaaaaaaaaattatgagctccaaccagcaaaataagaattagctaatgtgggaaattaatatcattccgtaaaggagagagcacagatccaggactctccagcaccttccatttccacttagacctgctgtctgtctgggttgtgcaagccacttaactactgagcctcagtttctctaccaattaagcagatatgataatacctgtggcctttccctgtctccacaggagtgtcatgagggtaaaaggaatggtgcatacaaagcatgttgagatcttcagggaagatacatgtttataaagatagaaacatcataacaataataacaccttacgtttgaatcaagctttgcacttatcaaagctctttcacatacgttatttcaattgactctccaaacaatcctaggcagatactatccctgttctcaggtgaggaagctgagatgcagagtgattaagtggcatgccaggggctggtcttagtgtgtagcaggtcttctgactccaagcctgatgcccatttttgatgatagcctttcttggatagattatctacttccctgcctccctgaacggagacctagacataattggcccttttcttgatgactcgtcattaccataggcacagtccctgggctgtcctccaggtttggctgtaggtacaggtccaggtcccgcagaggcacagggtggatgggccagctgtcccggagggtactcctgacgtgtaggtggcaaccatcctagagccctgcaggtgtggttcttctgactctgcctcattcttccccctgtcccctttgtctccactgtcagcatgtgtgcccatttctgtggcttcctccgccaccacggcctttacccgtcactatcttttcttctttgtttccctctctcctgccctacaattctttccacaccttcagcttgtccccccacagccctggctcatccaccggcccagccagccaacctcagctcccaggctggctttgttctcccgccaatcacagccctctgcaaacctcccactttggctccctcatggctgcccctgtggccacctccagtcgctaccaaaggaaggaggctcctccaggcaggggctgggctgagctttttctgcagctgcattaggtggcttgggtttgctctcccacagtagaaggctgtgctgtgggtgagctgaggtggtcaaggtgggctggccagcccggcttggatggacactgcacccctcactagcaaggcaagatgttgggattgccagtgctcatccctccctgcacagcgaggctgccccatgagttctcagcaccccctttccctccctgcagggtggcatcccaagctaccagcctggttacatcctgggcatgccttgggcagcctgcctgtgcccgtggcccttcccccagggactccaggagactcccaccaggctgcctttctccctggctgctgtggggcctcccacagccacagcctgactggagcaccttggtttctccctgagggaggatatgatgggcgtgcccacaacaagtctccggcagagacaataggacaggaatgcattcgcttccgaacaaacactgtgtgggctcgcacaattgccttggattcttgtccaagaaacacattttgccgttcgagggcacgggaggcttgcctgccccagcccgcccacatccccgtcagtgccagagactctgatgagtgggctgctcctcccccgaccccagggcctctgacccccaggtagagcaggctggtctccttcatggatgcagctcgtcttccagaggtgacagcagaggagagggacagtcctgcccacacagagggtgcctgctcctaccaatgcctttttttttttttttttttttttgagacagagtcttactctgtcggtcaggcaggagtgcagtcgtgagatctcggctcactgcaacctctgcgacctgggttcaagcgattctcctgcctcagcatcccaagtagctagaattacaggcgtctgccaccatgcctggcaaatttttgtatttttagtagagatggggttttgccatgttgtccaggctggtcttaaactcctggactcaagtgatccacccaccttggcctcccaaagtgctaggattacaggcatgagccaccccgctcagcctgccatttttttaaaaaccattttttattggttaataaatacatacatatacatataacattatgtaaagcttaccattttaaacttttttttttttttttttttttgagacagagtttcactctatcgccaggctggaatgcagtggcacgatctcagctcactgcaacctctgcctcctgggttcaagcaattctcctgcctcagcctcccgagtagctgggactacaggcccgcaccaccacacccagctaatttttgtatttttaatagagacggggtttcaccatgttggccaggttgatcttgatctcttgacatcgtgatccacccgtctcgacctcccaaagtgctgggattacaggcgtgagccaccgtgcccggcccattttaaccatttttaagggtgcacttctttggcattaagcgtattcacactgttgggcaaccatccccaccgtccatctccagaactgtttcaccttccccagctgaaactctgtccccatgaaacactccccatcctccctcttcccagttcctggcacccaccattctgctccctgtctgtatgaatttgactactctagggacctcatagaagtggaatcatacagtgtttgttcttctgtgcctgacttatttcacttagcataatgtcttcggggctcgtccgtgttgtggcatgtgtctcaatggccttcctttttaagactgggtgatattccccttgtatggatttaccacttgtttatttattcatctttcagtgaacacttgggttgttccgcctcttgctattgtcagtaatgctgctgggaacatgagtgtccaagtcactgttcaagatgccgctaatttttgagatctgtgtttgagctaagtgaagctgttgtctcctggcgatcccaaatagaacatacataaatgagagagctagtcggccctctccgtactggcagggattcgtttatccccaaaatgagctgtctcttaggaaatcagagccctgaagaaatgggacataggacaggtcatttaggccaagatagacaagactggaaaggttcttcccttgggatgatacccactaaaggcaagttcagtagggatttctgggcagccattggtcaccctgaagcatggagagcccgggagggcaatggcactgacggggccccagggaggaagcctgtggagttgtgccaagggccccctggaagaggcaggccagacccttgttctgacacagagcagcaggtggggccttcagctgtgtgccccatccaagggaggctgagggagcatcctccaccatcccttcaccccgaagggtctgagaatccactctcaaaagccagcaaccaagcaggtgtgtgtggggaggacaggacatggtctgcagccaccaaggcccttcctgtgctctctgcgttccagcaactgggagggacaagtaagatgagaaactccttccctgacttccttgagaaaacccagcaggccgtttgcaagagggcctctcgcacaatgtggtttttggcttcatgcagactttcccaaacaacccagagaaagataaggttggaagggggggctctagggttgagaacccgcccccagctctgccttagggccctgggcagtctgtcctctgccctgacaggagttgggggagtagggggagcaggggcagtggccccaggagcctgcctgcggggagtttgggcgtgcccagggaagaaggcatgggaaggggaagtcacaaagatacgagaagggaagaaaaagagcagggagactgtggaaccgctctgcaggcccaagcagccccatcacagaaagtggaaggcacgcaggctgtgggctgcagaagagacgaggaggagacccttgattgtcagggcaaagcgctcactgtcaacacccctgggactccgggaggcttccacgcagccctgtcagcgtctccctctctcctcggagggagatgcagccacattgagagcctctagtgcctggcaggccctggctcttctcgaaatttctcatattattacttcacttgtccctaaacctcagaacctggcaggcacaggcaagggaccagagccccctgagaagctagtctcaggacacaccagggccccaggcgcacttccctccccgggagaagcattgactgagcagccccactgtgtcagccagcgacatccgcctgcggctgcttccccagctgccctcccttccttcgcatcagctcccgggttctgcctcttccccacccagggccaccacccactctgtctggagtttcattcccaccagatacttaccttccccctttcctgtgatttctaccagcaatttttattttaaggatttttttttcctgctaagcaccctagggaagcatatgagggaaatttactataagaaagaagttccagcctaggtggggtggttcatgcctataatttacctagcactttggaaggccaaggtgggaggatcacttgagctcaggagttcaaaaccagcctgggcaacatagtgagatctcgtctctagtaaaaaattttttaaaaattagccagacatggtggtgcacccctgctcccagttacttgggaggctgaggctggaagattgcttaagcccagcaggttgaggctatagtgagctatgattgtatcactgcactctgccctgggggacagagtgagaccctgtcttaaaaaaaaaaaaaaaaagttccagcaagaccacacagaattctcctgatgttaatccccattttccctgctgagtaagtgtggctaggcccacctttccctccgatcccagtcccagacagtcacaggaccctcccaggccctgaaccagcccctcgcagttggatgttggaccccatgactcaggtaggcttgctgcaggatgagtcacaccccccacctccaactttttctagaacctgcttactaatctttatcccggcctcttgggtcctctagatgagggagaccgttgcctgtggcccaagaaagtcccccaggcactgactggtggaagcctcccttggctctccttggggatccgcagaccccagtgcgggagaggggtcactgccccagagtagcccacatgggcatactgtaactacttaaccagtccccttgttgggagaggtccaggttactttcaatcttttgctctaaaaatagtatagcaactagtgtacacgtgttgtatggcatgtgtgtggttatatgtgtgggataaattcctagaagtaatattgctgggtcagagggttttggacacttctgttgttgatgattatcaccaaattgccatctatagagtgataccagcttgtatttctacaagcactctatgtttgcagacgcatcgataataattctgtgccatgtcccttctggtgacaggggtatggggaggggtaggtaaccacatccccctcactctcatcttttcaaaggtacgtgcatcagagggccttgcaagcagtctctctgggtgagcattttcctttcctgtcacagactctcagctgggcgagttttctccctgcctcccaaagcatgtttctgagcaaatattttccagtgtgtgccagatgttggggagagcagtggaccgacatcgccctaccctcatggagcttgccttctagagcggggagacgggcaataggcaaacaagtatataatatgtcaggggccgcagaaaagggtgagctgggaggtaggtgggggatggtggctgctcagggaaggcctgtctgccctggggatgtttgggcagagccctgcataggatgagggagtgaggtctgtggatctgcggtggccaagaatttccagcgacaagtatgcagaggcccagagttggaaatatgtgggtgggatgcgagaccccgagggtcctcagtgcctgtcacgtgtgcagcccatactgttccctcccctgggttgaccgttgctctccacctgctcatcatttgagcagtttaaggcccacctctgctcactcatcccaaaacgatttcttttctgtgtatctgctgcaaacccagttctcaggccagttctgaccaagttaccaaggagaatgaggtctggtccctgaaagtggctctggccaatcaagcactcctacggccctggagcctgcaccctagtttggcctgcagccaagcctgccgtgggtcctcagctcctgtggtgaatgctgtagctcctgctgcggggcccctaggctgggtggatggatgcaacgtgacaggagacaggaagaattaaggatgtgcagaatgcagattttgagccagcaacatgaccagtccccagggttggctgggcatgattttgcctctccttcttgactatatcatgcccagattaaaactttggctccagctctccgtgagtaaatgaggatgtgccctcagaatgccatcttttaccctcttctcaccttctacccttccttttaaaaatgcaaaaaagaaatgcataaatcatgttgaccaacagttcatgaatccccactgttgccaggggctttgcttggggttaaagggcagcagagatgaatttggcactgtccctgacttcaagaagccgacagttcaccctggaaaatgtcttaacttgtgtggaatgtgcatgggggggaaagcaggagtgcctgggagtgagaagcagggagggcagggactggggtggtcaggaagggtccgaggaacagctgggaagtgacccagccttaaaggatggagagaggatggagagccccaaagatacaaagtcatttggagtctaaacaccagctatggagtgcggccctttaacctgcatgggaagaagtcatggaaacccatggctttaaccaaagaggggcctgaagtagaaatgatttctccctggccccaagctctcaccttccccatccactctagaggcaaacgtgtgcaggcctgacccgtcttgctctctgcccctgctgctgccctaggccacactgccaccatgcctggccaggtccctcaatgtccacccttccctcctacagcaggcagaatggtccccttaagacataaaccaggccaagcatggtggctcacacctataatctcagtgctttgggaggccaaggcaggaggatcacttgaggccaggagttcaagatcagcctgggcaacatagagagaccctgtctctacaaaaaataaaaaaaaattagcagggcatgatggcctgcacctgtggtcccatctacgcaggaggctgaggacagaggattgctcgagcctaagagtttgaggttacagtgagctgtgatcaagatgtatacaatgtggagtgattcaaccacactcattgacatattcatcacctcacaagtgctgctttgcatcacagtgcttaccgccatctgatagagatgtttattggtttgttttctgcatttccaccgccccggagctgcatttccaccgccctggagcagggcctggtctgtcttgttctctgcagtgaactgtgctggcctggcgcaggcgctcggcaggtacttgtgactttgtctcttttgttttggtagatctgtgctgctttcgaagtgccacctcggcatctctctacagtgtgatcaaggagacctggcatctggaacaggactgtgttgagatcagagagacccagtctgtagtctgattgatctctactgactttgaggttatggaagttgtaggaaggttgttgttatggtttatacagcatgtagtatattttcattcattccacattccactcaatatttgagtacctactagacatagttcaaggatttctgtacatgaaatgtgccaaaatgcttctccataaaagcagtgaatcacctttgcatgaattgagttagatgttggttactgggctcccttgagttgtgggttaggagttaactgtggcctgacctggatccctgtgactaggtgatgctctcgagtttgccagcaacagaaccgtctctgcgtccaacatctcctaagcgggacagtagcgtgggctgtggcatgctaggaagatcactctggccagttgtgtacaagataaattgcaggggaaggaagtggggaccaggatgacgcatcaggacgcgggacagtcctccatgagggaagcaacaaaacctcacctttgagtaaggccagggacctggaaaagtgggactaaaatgtctccaggacgttttaccaggaaaactaccagaacctggtaccttcttggttatggatggtaaggggagagcaaaatgactgaggttttgagctggaggtgacatggagctgctttgaggcaaagatgataaagccatagtgtcatccagaaagtgaagcccaatgagtgtgggaaggttcgtgcagacgagctagatgtggggtccctgagagtcgtgatgatcgacatggcaggaggggacggcattgagaagagcagaagcttgacaataactatttggggaggaaaatattggaggaatgcctgttttaggaactgagagaaaaagcattagccagcaaagagggctgtggtaggagtggtccgtggggcttggtgagcttctcggaagccacgcccagagagggtttcaggcactcggtgtcagcacaccagtgctgctggggcttcaagagagagtgaatcagaaaactgggacatagcaagcattggtgaggctgtagagaaaccagaaccctcatgcattgctagtgagagtgtaaaatgatggagccattgtgggaaaacagtcttgcagctactcaaaaagctgaacatagagttaccacatgacccagaaattctaatcctatgtaatatccaggagaattgaaaacatgcatccaggaaaagcctggtacacgaaggttcatagcagcactattcctaatagctaaaaggtggaaacaacgcaaaagtccattaacagatgaatggataaacaaaatgtgacatatccttacaatggaatattagtcagccacagaaaggaatgagatactggtatatgctacaacatgaatgaaccctgaaaacattaagtgaaagaagtcaatcacaaaaggccacatattgtgtgattctatttctataaaatgtccagcacgggcaactccatagagacatagaatcggggggagttgccagaggctggagtgaggaggaacagggaatggctgctagtgggtatgggtttgtatggggagtgatgaaaatgttcagaacttaaatagtggtgatggttgcacaattctggggatatcctaaaaagcactgcattatatactttaaaatggtggattttgtgttatgtgaatggtatctcaatttaaaagagacagagagattgagagaatgagccaggcaagtcgggggaagcatggactgtagcacggcaggactgagcgctgagcagcccagccatggccctagttaggaaacagttccagcccctgagtaagtccacaggtttgtgggtttgaaagtctacagcactgggccagtggagaagagggctttgactcctggacttcctcctgtggccagggcccaggggtgcctgagtcaatggctgaacctcctcacccatagaggagttaccaattatacgtctctaagctaatttcatttccctgaggacttctgctgaccagttgttaacactggatgatcccagcgcactcactgctgcaggctttctcttcagtggcctcttgaatcacggtgttcagacctggcccaggggctccacatcgcaccatcacactgacctccagctgctctaaccctgtcggagaaatcacggccacccggcgcaactgactttctgctctctgacttttgtgggctctcactctagcctgaaccttggagatgtttgttacaggccgcatcagggctggggctgcaggtcggcgggggctgcagggagctacagggcccagtagccggcatgtctccttcagtggtgctctctgcccctctcttccacagctcttgcaatctcaggatgtgaaggaagatgctgtcctttgctgctctatggaggtaagctttggggcttcgacatccccaacctcaaagccggtgcatctctcatgccttaacagttctaggggcacgagggttgttggaggcatttacaagtccaggggaaggtaggtggatggcttcaggagtgggcatggacttctgcatccagaattatccaccccaagccagagtgaacactgatggtgagagcagctcacccctgactgaagggagagagaagtgattcccagtggcattgcctacttccctgtcccccaaagaccccctgcgccccagctcaggcatgccacacaaatgacttaagaagttcctgattacctctgccctcaaatatttccctttgctttgctaatgcttggcaatgcagtgctggcacagcccacccgaaagcacacctcttgggaggtgccactcctgtccctaagctgtggcccctgctaatggagactcttcctctgggctctccctttagcgcctggctttggcccagtccctgggcagatctctgccctctgcagatggtccagagtcactcagagtgggatgcaggcaggagaggggcttccagacgaggacctgggcctggcagctgtcataagcatactcaggtggcttccgcctggctgcaaaggcctcactgaggagctcagaggccagaagcactgggagccagatggcagtcttgggtctgtgggactcagtttgtttgttggcctccagctgggcaccctacagggggcttgggattaggggggaattagggagaaggagaaagcctggtccttgccctcaggcagcttccagtctggttaggaatagctctcagagagtagatagaataagtgtaagtacagagacatccctgaagagtcaggggagagaggtcaggaagggctcaggggttcaagggaggctttgtgaagaaggcagagactagaaaaatgaatgggacaaggctggggaccgagacggggactgagattctatagagagggcctggggggcactggccaggggtgtgctggtccaggaataggggctccttcccagtgggcttttcaagattatctagggctctcctgacggcctctggctggccttcttccccagtttgtatttctctcccccacttcctgtcacaagcatgagcagaggtcacttctgggggctgggagatgggatcaggatcaggagaaaaggagagcgagagaaacaggaggcatcacccctgctctcaagttccaatggacacatgtaataatgactaagctctttgccagagagacgccccagcaagtgaaaatgaccacagggccccctgatcaccaaggggcacagatcatggagccatttgagggtgcggatgtagtcagggaaggcttcctggaagagggaggctcttgggtaaaagggacaagaggcatgttcctggtgacagctctttcagccctgggcagtaggcaatattcggatccctctggatcctgctggcagattggttggtaaatgtgagctctcactcttggctactccaccttccactctccctgtcctcattccagctgtggcacaggggtctgggcctgtgtgtccttaagacaacccagctatttcctatccctgcccacctaatcagggtggccagtgggccactgtgggacccgaggccatcctaaccccacatctctgtctgcagctgcagagtacaggccggctgctggaggaacagctgcctgagatgatgacagagctcctggccagcgcacgggacaagatgctgtgcccctcggagtccatgctgacccggtcgctgctcctagaggtcatcgagctccacgctaacagctggaaccctctgacgccccccatcacgcagtactacaacagaaccatccagaaactgacagcctgacagccagggggcctggcaggcggcccacgggcagctggggccctggtgcacagggccagatggacaggcgggaggacaggggtggccctggcgggagaaagaaatggggaggagggcaggcagagtcggtggccagtctggagccagacggggaagggagcaaatccctgagaggagtgcccccgcacaagccccccagcccgagcatgcaagctcacaccaataagggaagcatgtttctttttcctggtggccctggccctccccttcctcactcccgcctctcccctccccatcagacccatcccccacggagctttgtgtgagggatctcatcgctgtgactcctcggagaccttggcagcctcgcacgccggggcaccgcttgggtcagaaaggacctcggaaggctgaaaaagtgggtcggagacgggctcgcattgttcccgcatgctgtcagccgcagtcgccaactggcagcaggcgacgtgtagcagatgtccgggaggacaaaggcaggcacggtccccaccagccgcccgtaattgacggcctttgtcagccatggcagagctgacgctccacctcccacctccaagtcctcctcactgcagcccccacagcctcaggcctagggggtcaggcgcagcgggggagatggagtttgcagttccacttgcactcttttgtttattgtgttttatttttcaaaagtcggttgctttgaagtctctttggccaatgaaaatgcccgtgatgtgatcacacagtcagcactgttgaggacccccggattagtgggagatcaaacccagctcccctctagaagaaggattcgagccacagacagcttgccagtagccaattagggtaattggaaacttctgccccggcggggggtccccgctggaatcctgtgttcctcgccactggcttccagcgcctctgttttctcaaagggctgatactgtcaccactgggaccaagttaaacctggtcctggccccaggggccttgtggcaaacagggcacagaacgagactggcaaattaaaaccaaaattctagatggtgtcttgcgctccacacgcaggtcttactggggaaaaggatgggagtgggggctccccaggactcgattttagctaatgcgctgtgtcactgccccagctcggacgtagaagcccagccctccgtgagctcttgggaaaggggtgaattcactgggtcatggaagggacagtcaggtgaccagcggggtcgccagatgaagcttcccagccgggaaacaagacggggtttcttggcaggccctggtcctggggagcaggccctgttgttggctggagaggaaggtgtggggtggaacaggtgtccacatagctccatctctgggggctggagcacacactttgatgagcccccccggaaatgatgtcagagcctagccgcttccttatttgctcttttattgaggccgggcaggccctgggtcactttggaggcccctcttggtccacactggactggccgggaggtgatgggcggggaaggttctcgtgattgattgattctgagtctgagagtggcgagtggggagaggcttccccagttctctccagctttccctgcagctgcaacctgccctctggtcccaggtgtggagcctttgcctgtctctaaaaagagcctgttggcgacaaggtgtagggggcacaagtttacctgaaacaggtcagtggtctctcccaagaagcgcacgccacctctggtccctggccctgaaccctgccttcttcctccctccacggtttcttcccagactttctcaagctcctcctcactgcccttcctccccagcccagcctgggaacacagatgccccgcgggtaggaggcctcgagggaggagccgggctgatgcggggctgctcagggcaggccccagggcgagcttgccgtcgtggccaggcagcctccacctgtgcttcagtggcccctgcccccctgaagcatgtggggtttgtccgctaggaggaggcaaggcccccgaagagaggagagacctgggagtgggagctcaggtcagggaggaggcaggggagtggggtctcccagacccaacggtgagctcagagcaagcttcacgcaggacgctccgaaacactgtgtggagggggctgtgttgtgggcaccttggggcctgattctccttcctccgaacgggctccttgatggcctggccacaggggcagctccccattggctgttaggaccagagtgtgaagaagaagtgaaatataaatatgtatacatatataaatatatttttaattacatgtcgtgtcacggtggctccagacatactgtttgcctagtttattccactgcttgaaagcgcttcctagccaatctgaacaacaacactttaagctgtttttctaaatgcaggttgctgctcctttttcagatatggaaggaaaacgttaagactattttttttttaaagaaacaacagtcaagcctaaaatttgagaccccgaggcagcttcccgagggagactgctcagacaggaactgcaggacagaagtggatgccccacagaccctggccccctccccaagtccatcccctctctgtggcatgaggaaggccgcgtccgagttgacctctgaatgtatgtgatgagaggcagagctggatattgcatttctaaggcttgcattgctttcccctcgcccgcggttcttggcgcatggaagaggcggtccagccatctgatgttgatcctgtctcagtctccccactgcctgtcaggatgagttagtcattgtttttctccgaggcggcctgcttgccacagccctgctccccaaggcctggtggctttgccgaagctctgggaccgcagccccagcgaggctcccaacctcacccagacgaggccaggagccccgccaccctccacgggatgtgcaccctcagaccccattctctctgttcgtccttccttgaccagtctgtaaaccttcactgtttggggatcgtcctgtccatccatgtaaatgtaaatgttggccgagtcggtatttattctgatttttattttattctattatttttctccgagggatgagggtggggggtgtgggaagggtaccacagatcaggccggggcagctgtaggggcgggggcccagacagccaggccgccaccagagcagccccatggggtgccccagacgcgggcctccaagaagccaagtcccagtctgttttctggcatcagacaccggcccgtgttccttgtcagacagacagactctcaggcctgcctggggagtcgtgtccctcagctgcagggcactgtgttgggaaaccattggctgggcctttgaggacacagatcagaagaaagaaagacaactttcctctgcgcggaacactcacacggaagggctggccgcctccctgagccggctgggagtggacgacaggacctacctccccagagcaagggcctggggcttcccgccaaagctgccgcggaaccccgctagtgcgaccaccctccctccgtcggtatgtcctgctttccagctgaacccaaactacaagtgggtttaaaaaaataaacaccaccaccaaaaacaaaatgcccagagtctgtgctctttgtgtgttcagcaaaagaaaccttttccccaagctcatgtgcctcagctatactagcagggcctccaggagctggcccaggagatgagctgaggggaagattcttgcaagaagttggtccaggagaccatgggtgaaggagacttacttacatcccccaaaactgggaactaactatgacctatccaaagtgacctggacctgtccaggatcaagccagtcctggacaaaatggcttttgcactaaaggtttggtttaaccaaccccccccaaacctaccccttccctggaaatgtcactgtggcatttggcaatgagtcatttcaagagggctgagatttgggcccagtggctttcaaaagtcaacagcgagtggctgtccagtcccagttggtcaaatgagtctttcatcaacgagtccccaaagggcccagtgatttcttttcctgtgatgacatgtctcttgttttgcacaatcttgtctatggcaaggcactggggacactgtttcctggtaacgctcccctttccttggggattctttctggctagaacttgctggtccttcagctccttgcaggggtcgcaccagagcaccaactcccttcctccttccctggcctggctacaatggcggccagggcctcccaggagccgggtgaaggcatgttgagattcgggccttgcccttcactgagtcacacacccaccatgacactgacagggacagccagaagtccacagactgggtagagagagagaacattttaattaaacaaacaactgaggtatgtggcgggccaatttttttttttttttttttttttttttttgagatgatgatggactctcgctctgtcactcagcctggagtgcaatggcacgatctcagctcattgcaacctctgcttcccaggttcaagcaattttcctgcctcagcctcccaagtagctgggattacaggcacacaccaccacgcctggctaattttttttgtattttagtagaggtggggtttcaccatgttgcccaggccggtcttgaactcctgagctcaggcaatctgcctgccttggcctccgaaagtgctgggattacaggcatgaaccaccgcttccagtcctaatttttgtatttttagtagagacaagttttcgccatgttggccaggctagtctcaaactcctgacctcaagtgatccacccacctcggcctcccagggtgttgggattacaggcgtgagccaccgtgccaggcccaaatttatttttataaaaatgcaaagcagtagaagcagacattggaggtcaagatcaaaggtagggcgacgatgaggaacagagagccttatcacaccctgcaaaagagaaaggagattttcctggatgggctagtcctgcttccagaaggccctaagttactgaatactacgagacacagcatcgaaataatacatgtttcaatcctgatttcaccaccatctttctgcttgtaggcattctcttgtcattttagagtgtttgtttacatttgtactgggatgctcacagcgtaacttataagggccttttaaggaccaaggcaaagatgatgatagcagaaaaataaagggttgagcagttgaaatgggaaagaagtggtcctgccttactgatctccctcattcctgcagttccgcagcggcttccttacacggtctcagctggtcccgtgaagtaggcagatgagtgttttcgattcccattttatagatgcgccaaaggctgatcaccagaagagccaaggcgagggtgagcccagaaagtgagtgggtccttcagactcctcatccctgcagcgccccagggagccagccagtcacaccagccagacaaaaggagcagccagctgcccccgggactcggcaggctgcgggcaggccacgtgggcttcccgcttcattggtggaaactaggaccatgatgaaatacctcagatcaggagatttcagtggagtgggcagaaggagcgatggtgcagaatttggtgccgttctataaaaggacccattatcatatgtgcagtgtgtgttgctggatcccagtttcccccaggccagtgagggggaccctgatagggggacatatcaagcatcagggtcaatacccgaattgcctgggaacattttcaaactacatactaaaacagcacacacatacacaccaatattttcagaatttgggccttggggagcccctcttcttactggtacatgtgtgctatgccttggatgggtgcaagagaaaagatggttgagagccgccatccatcactcctggaacacagtacgatgatggccatggagagctgtcataagtagtgcagaattattgtctggggacagcaggccatgctgctgtgctcttttgcaatctcagggtctgccatcttggctgaaacaacactggctggcacatctgcaacatggggcaggggctctggcaagttgcttgaatgtggaacagaatccataccatggactcgggctgcattctcactcctatgggccttaggtacttttgccttcataggccccttcttccatttaaaaaaaaaatggaaatattatgactacattggtaatagagacaaatatattatttttattaaaacattttctcccacctagaagttcatttttttacccctgattttaaaaaaattaaaacactttgtgggcccctaaaaaacattttgtgggctcctgtcttagtccattcaggcatctgtaacaaagtaccatagacttggtggcttatgaacaacagacatttatttcttaaaatactagaagttggatgtcccaaatcagggtgccagcatagtcatggtctggtgagggcctacttcccagtggctaatttattggatcttcatggcagaaagagagtaagagactttgctggggtctcccttataagggcactaaccccattgataagggctccatccctctgacctcctcacctcccaaaggcacctcctaataccatcatattggggattaggatttcaacatatgcatttaggggacacaaaaacatgccatccatagcagcaccctttgtatatgcctaacaggtgtattggccctacctgagtgtcatctgagctgggagtcccacctttctctgctgcccacctgatctctgggtgactcagggctggggagggggagtggttcaaaagcagtcttccaaggaagcagttggcccgtgctggaagcagatgcagtagctgcctctgccctggactggctgccagccagacagctccaagcgccagccagagcagctgtgtttgccgcgctaaggaggctggcccctgagagcccgattcatcacacagcactttctcccctctgcagccctttagcacacattatctggttacggtctcaccagagccccgtgaaagaagtaaatacaatgcttatatccatttcaaatctggggaaactgaggcttacagagccatcccataggtttgaatggggctttatagtctttaaatatatgactatgttcgatccttacgacagcgctgccaggtgacatgtttttgacaccattgtaaagaagggagacaggctcacagaagcagagtaacaatcccatgtcatgggacctgtaggcacaaagaccaggcctcgaattgctgccttcttagtcctaagatgggactggtgggtgggtatggggaccaggctgaggacccaggccacctttgtgcctgagtcccctgatccaggcctgtggagtgcaggtctgtgcttcctgctcagtgtcccataattctaactggtctccatcttcagcctccccattcactgggcatcccctggctcccaggcagagtcctgagtctcctgcaacccatgggggcatccattccatgggtggaatcagtcccaggtgacagattaagtcttacaatatggccaggccaggcacagtggctcaagcctgtaatcccagcacgtcgtgaagctgaggcaggaggatcacttgagcccaggagtttgagaccagcctgagcaacatgacaagaccccatctctacaaaaaaatatatatatttttaactagctggtcgtgatggcacacacctgtagtcccagctactcagggggctgaggcaggaggatcactcgagcccaggaaatcaaggctgcagtgagctgtggtcgcaccactgcactccaggctgggtgacagagcaagacctgtctctaaaaaaaaataataaataatatggccaggaggccaggcatggtggctcacgcctgtaatcccaacactttgggaggccaaggtgggtggatcacttgaggtcagtagttcaagaccagcctggccaacatggtgaaaccccatctctacaaaaatacaaaaaaattagccgggcatggtggcgcagcctgtaatcccagctactcgagaggctgagacaggagaatcgcttaaacccaggaggcagagattgcagtgagccaagaccgtgccattgcactccaccctgggtgacagagcgagacttaatctcaaataataataataataataataataataataataataatatggccaggatcccacagctgacctgaagcagagatggttcaagggtgatgctctgtctcctagtctcatcacctgtgcccacgtctttcaagtgaacccctacttgggtcccaccttgtgctgggggtgctataaggaaataagcaaaggagacaatgccttaaccaccttggcatggtcagtctcctgggagctggaatttccagacaacagacaacctctcataggcctagcccaactctgggtaggtcctggtgcagggtccctgcctgtggcatctgctgtgctacagagagccaacacctggcccaggccttccaatggggaccattcagggcttgacgaagcttcactttccagccccagagaggaaggaccaccattcccctcccttcccagaacaaatcaggtgaaacccaaatacccacctaggccaaaagaagaaaacttccagtgggaaccaagacaggctagcaaggtgaaaagagacttattctatagcatttcccccaaataacaaaagtgtgattaaagcaggtgagaagccaattttaacaacacttgtatgcatacacagacccttgcaattctgcacactctaaaatcttactttttgtggcttagaatgtttcagcactcagtggagtttctgcagccagcagtcacacctacagagtttcaaatccgtgtaaacgctgtgtcagcctaaccaccagtgtgattctgtgtcattcgggggcaaatgttgatgtttcttgggtaagtgaaagatcatgcagagagcttccggaagaccatccttaggagctgaactgaaagaaggcctctcagaggggccacagcctccttctccctgtgctagagacaagtccctaatagccatctatgctcaatgggactcaatgtgtctcgggagcctggaagcctttttctgccccattcctgacatcatgccacctacacatcagacacaaggcacccggcccactccatcacctccagttcccagaaatgtgcagggagctcaggtcagggctcttgaatctcctgctgacccagcagaacatacgacacaaaggcatctcaaaggcaaacaaaatgggtgggagggaggctcatggcccaggcgcgtcatcagtgcagtcctgttcagccagggcaaggctcagccgggtgcagcttagaggaaaaggagaagtgctgaggctgagcaggtggggagggactgtaactcatgaggtgtgtcgccagattggaaagggggctcagggtccgtgttgcctagctactgccatgtcactgtgtgactaacaagccccaaatctcaggaactgcaacacagaggttcactgttcctgatcacaggtctgcagatgggctgtctctgatccacaccatggcctccctttctggtgagaaggggcagagctcagcatgcagtgagtcacagaagttagaaagcacgtgcctctgtctactgccacctctttcaggaagctctccctgactgctccctagtcagggttacagatcacccctcggggctcccacagctgccagggatgttctgccacagtcctgctccctgggcatggccattggtgtgtagatggcagatgcctgctgaggatgagcgtgacttcgtcccctctgtctccccagcactaagccagggcctggccccagcaggtgccccataagcatgtgggggatgaagggaatggtccaggtactaagggactgaggggcttggggagggaagagccagctgtgcctggagccacatactcgaggcagggcactcagggccagggaggaatacagggtggggcacgggcagggccttccagtggggagagctgggggtcctcaggggcctgatgtctcactgtctagagaggcctggaggtgggtggggagtgctctgtggtcatgggtgccagagtcttagccagtgcggagggcaccttcgtgccagttaggaggtgcccttcctccaggtgcccagccctgccccagaaccctgggagctgcctcagacccacagctgggcacccttgtgtaggacacaacctgggcgctgcatgtgagactctctgggtgtggagtgtgactgtgttgtgtggggtgcgggatgtggtatatacgcacacacgcagggagcgaggtatgtgtggttggagagggttgcgttgtgtgttgtgtggggtgcgggatgtagtatatacgcacacatgcagggagtggggtatgtgtggttggagagggttgcgttgtgtgttgtgtgggggtgggggatgtggtatatacgcacacgtgcagggagcggggtatgtgtggttggagagggttgcgttgtgtgttgtgtggggtgcgggatgtggtatatacgcacacatgcagggagcggggtatgtgtggttggagagggttgcgttgtgtgttgtgtggggtgcgggatgtggtatatacgcacacgtgcagggagcggggtatgtgtggttggagagggttgtgttgtgtgttgtgtgggggtgggggatgtggtatatacgcacgcacgcagggagcggggtatgtgtggttggagagggttgcgttgtgtgtacatggtgtgagaatggagaattagtgtggtatgcgtgtggtgtatgtgtgtgtgctgtgtgtgggtgtgtgtgatgtggggtgtgtgaatttgtgctgcactttgcaagcctcccaggctgggtggcctctgtgcagggagagctgggaggcctagctgtgagggtgccacgtcctagagccagaaactcaggtgtctcagtggccaagccttcgcctgcccctgggagtggggccgacacggggtctgcaatggcagagaacgggctgaaggtcctcagtgggcaggcacagctggcctcccctcaggaaggcccttccttccagaactctggactatcccttagttagggagggaacggtctggacagactgagccgaggaaaatattcctggtcaagggatgccctcagcttgaggtgcctggtcggaggctcagaagagatctgggggagatgctgggtccacacaaggatgatgttctggaaaccggaactgcccaacggtggaggaggccgcttcctaagggagcaaagccccacaccctatgcccttgatgagttccagcaacactgcggccccctcagccatggtgttggaggaatctccccttcatggtgcagggcgtgggtcagaacacgaccccacagacccctcaccctcctgggttccatagaagcagtggggatgccggggccacctccttccatcaattgcacctgctgcccctccccagaagttcctccatcgcttttccccagtggcccctccaaatactccaggataccaggatgtggaaggcactttaaagccaccctctcgttttacagatgaagacactgcggcccttacagggaagggactcgcccaaggtcacagaggtacagctaacaccacgggcacgcctcgaaccaggcacccacctaagcgccctcatctcctcacaccacgcccgaggtgggaccttctccatcttacacaggggaggacttggcctggggttgagagaggccaacatggcccaggtcacagcactagaaagacggcaggattctcacagggtcccctctgctgccaaggccctgctgctgaccctgacgcacacactcggtgtcccccacacagcgatgaatcagatacgtccacagagagaggtaggaagaggtttagtgaggccaggcagctcactcggcttctttgagcctcggttcatctgctgaaaatgggaatgcacaatcccatcttgctagactgtttggagaaacagtgcatgagctttgagtcctccacaaattacggctctcttccctcttaaccacgagactcgcccgccttgctgggtctgtctgctgctgattctcttgggcagtgggcgtgcagtaaagcctatctgctctcccgctaggacccactgggactggggtcagtggacaggtgttggtgtggggtttggctgaacttctaagcacttttgaagctgagacttaggttgctggcctcaccatcctcagtgaagcactaacaaatgagccaaagagtcacccaccaaacgccccactaagcacccatcagctgaccctgaacacctgctgggtgcaagacagagctgagccctgccctgggagatacagaaggaagacacacctgccctaccctcaagccgagtgttgccactctaattgaagatttaaggccagtcgctgtccaggtgaatgccacagtcccttcctgtgttcccagtggggaacctggcaggcggcggagagggcggcatgtaaagaaaagcccacaatgaggtgttctgctgaccacacacagctgcaccttctggtgatggagtcgttaatacctggagagggggccacccagcgaggcagtggcgtagggacccagtctcctggtggggagctgacccagcacacgaggtcggcctcagggtgggctgccagtgtgcaaacaagtgctgcctggggtcaggcagacaacggtcaaagtcagagtctctttatcagaagaagacaggaagaattaagggagacatcttcctgcagcatgcagaatggattaaaggggagaggaacggtgaggaacagcaggaaaaccagttaattggccaggtgggaggcacctccatgggggaggaaaactaaagagggttctgcgggctctgatgttcagccaaggccagctgtctccatcgcgggcgcctggcatggtgcagaatgaggcgtgacacagaccttcattttctgtagctgtaatctacctctttaaatagcaaaactttttattttcattttttggtagcaatctttccccgggggatcctccacatcccaaatttctcagaagtcagcgtgtgttgacttccttggtgactcaggtccttctgacaaggctaatgagtagactagactgcaacacggggttagcctcaggattgtcaaggtagaccccgtctgccttgcttttttaattactggatctgcattttacaattgttctcccttctctgtcatcataaaattcttcttactactatcagtatacctgttgtggcctgagaaactagaccaccaaacttacccaaactatttgccgagtaagaggaaataggccctgagtgagggcctgaggggcattttcataccaaaaagcatgagctttcctgcatgaatgggggttcgaagccacccattgatctgctcagaaaccatctttgcctgctttctcatccccggt

SEQ ID NO: 123 - DNA, 5705 bp, Homo sapiens
gtcagatcagggatcattttttttccttcctctactccctcccccctacccgcccctccctccctgtttcccttccctccctccctcccctctctgctgggtctgtgcgctggggcgcccgatcccctccgcagctgggacgctccgaactcgaggcaggagtcggctctccggagcctcgtccctcccttccccttccctgcccccttcccccacccccgactcgggcttggcgcggcggccagaggaaccccgagatggaaaactcctctgcagcatcagcctcctcggaggcagggagcagccgctcccaggagatcgaggagctggagcgcttcatcgacagctacgtgctggagtaccaggtgcaggggctgctggctgacaagacggagggtgatggcgagagcgagaggacccagtcccacatctcccagtggacagcggactgcagcgaaccgctggacagcagctgttccttctcccgagggcgagcccccccacagcagaatggcagcaaagacaactctctggacatgctgggcacggacatctgggcggccaacaccttcgattccttcagtggtgccacctgggacctgcagccggaaaagctggacttcacccagttccaccgcaaagtccgacacacgcccaagcagcccctgccacacatcgaccgcgaagggtgtggcaaagggaagctggaagatggggatggcatcaacctgaatgacatcgagaaggtccttccagcctggcagggctaccacccgatgccccatgaagtggagatcgcacacaccaagaagctgttccgcaggaggagaaatgatcgaaggcggcagcagagacctccggggggcaacaagccccaacagcatggtgaccaccagccaggcagtgccaaacacaacagggaccaccagaaatcctaccaggggggctcagcaccccacccctcagggaggcccactcaccatggctacagccagaaccggcgctggcaccatggcaacatgaagcacccaccaggcgacaagggggaggcaggcgcacaccgcaatgccaaagagaccatgaccatcgagaacccaaaactggaggacactgcaggggacaccgggcacagcagccttgaggccccccgcagccctgacaccctggccccggtggcttctgagcggctgcccccacagcagtcaggggggccagaggttgagacaaaacgtaaagacagtattcttcccgagcgcatcggggagcggcccaaaattaccctgctccagtcttccaaagacagactgcggcgaaggctaaaggaaaaggatgaagtggccgtggagacgaccactccccagcagaacaagatggacaagctgatcgagatcctgaacagcatgcggaacaacagcagcgacgtggacaccaagctcaccaccttcatggaggaggcccagaactccaccaactccgaggagatgctgggcgagatcgtgcgcacaatctaccagaaggctgtgtccgaccgcagcttcgccttcaccgctgccaagctctgcgacaagatggcgctctttatggtggaggggaccaagttccggagcctgctcctcaacatgctgcagaaggacttcacggtgcgcgaggagctgcagcagcaggacgtggagcgctggctgggcttcatcaccttcctgtgcgaggtcttcggcaccatgcgcagcagcacaggcgagcccttccgtgtgctcgtgtgccccatctacacctgcctcagggagctcttgcaatctcaggatgtgaaggaagatgctgtcctttgctgctctatggagctgcagagtacaggccggctgctggaggaacagctgcctgagatgatgacagagctcctggccagcgcacgggacaagatgctgtgcccctcggagtccatgctgacccggtcgctgctcctagaggtcatcgagctccacgctaacagctggaaccctctgacgccccccatcacgcagtactacaacagaaccatccagaaactgacagcctgacagccagggggcctggcaggcggcccacgggcagctggggccctggtgcacagggccagatggacaggcgggaggacaggggtggccctggcgggagaaagaaatggggaggagggcaggcagagtcggtggccagtctggagccagacggggaagggagcaaatccctgagaggagtgcccccgcacaagccccccagcccgagcatgcaagctcacaccaataagggaagcatgtttctttttcctggtggccctggccctccccttcctcactcccgcctctcccctccccatcagacccatcccccacggagctttgtgtgagggatctcatcgctgtgactcctcggagaccttggcagcctcgcacgccggggcaccgcttgggtcagaaaggacctcggaaggctgaaaaagtgggtcggagacgggctcgcattgttcccgcatgctgtcagccgcagtcgccaactggcagcaggcgacgtgtagcagatgtccgggaggacaaaggcaggcacggtccccaccagccgcccgtaattgacggcctttgtcagccatggcagagctgacgctccacctcccacctccaagtcctcctcactgcagcccccacagcctcaggcctagggggtcaggcgcagcgggggagatggagtttgcagttccacttgcactcttttgtttattgtgttttatttttcaaaagtcggttgctttgaagtctctttggccaatgaaaatgcccgtgatgtgatcacacagtcagcactgttgaggacccccggattagtgggagatcaaacccagctcccctctagaagaaggattcgagccacagacagcttgccagtagccaattagggtaattggaaacttctgccccggcggggggtccccgctggaatcctgtgttcctcgccactggcttccagcgcctctgttttctcaaagggctgatactgtcaccactgggaccaagttaaacctggtcctggccccaggggccttgtggcaaacagggcacagaacgagactggcaaattaaaaccaaaattctagatggtgtcttgcgctccacacgcaggtcttactggggaaaaggatgggagtgggggctccccaggactcgattttagctaatgcgctgtgtcactgccccagctcggacgtagaagcccagccctccgtgagctcttgggaaaggggtgaattcactgggtcatggaagggacagtcaggtgaccagcggggtcgccagatgaagcttcccagccgggaaacaagacggggtttcttggcaggccctggtcctggggagcaggccctgttgttggctggagaggaaggtgtggggtggaacaggtgtccacatagctccatctctgggggctggagcacacactttgatgagcccccccggaaatgatgtcagagcctagccgcttccttatttgctcttttattgaggccgggcaggccctgggtcactttggaggcccctcttggtccacactggactggccgggaggtgatgggcggggaaggttctcgtgattgattgattctgagtctgagagtggcgagtggggagaggcttccccagttctctccagctttccctgcagctgcaacctgccctctggtcccaggtgtggagcctttgcctgtctctaaaaagagcctgttggcgacaaggtgtagggggcacaagtttacctgaaacaggtcagtggtctctcccaagaagcgcacgccacctctggtccctggccctgaaccctgccttcttcctccctccacggtttcttcccagactttctcaagctcctcctcactgcccttcctccccagcccagcctgggaacacagatgccccgcgggtaggaggcctcgagggaggagccgggctgatgcggggctgctcagggcaggccccagggcgagcttgccgtcgtggccaggcagcctccacctgtgcttcagtggcccctgcccccctgaagcatgtggggtttgtccgctaggaggaggcaaggcccccgaagagaggagagacctgggagtgggagctcaggtcagggaggaggcaggggagtggggtctcccagacccaacggtgagctcagagcaagcttcacgcaggacgctccgaaacactgtgtggagggggctgtgttgtgggcaccttggggcctgattctccttcctccgaacgggctccttgatggcctggccacaggggcagctccccattggctgttaggaccagagtgtgaagaagaagtgaaatataaatatgtatacatatataaatatatttttaattacatgtcgtgtcacggtggctccagacatactgtttgcctagtttattccactgcttgaaagcgcttcctagccaatctgaacaacaacactttaagctgtttttctaaatgcaggttgctgctcctttttcagatatggaaggaaaacgttaagactattttttttttaaagaaacaacagtcaagcctaaaatttgagaccccgaggcagcttcccgagggagactgctcagacaggaactgcaggacagaagtggatgccccacagaccctggccccctccccaagtccatcccctctctgtggcatgaggaaggccgcgtccgagttgacctctgaatgtatgtgatgagaggcagagctggatattgcatttctaaggcttgcattgctttcccctcgcccgcggttcttggcgcatggaagaggcggtccagccatctgatgttgatcctgtctcagtctccccactgcctgtcaggatgagttagtcattgtttttctccgaggcggcctgcttgccacagccctgctccccaaggcctggtggctttgccgaagctctgggaccgcagccccagcgaggctcccaacctcacccagacgaggccaggagccccgccaccctccacgggatgtgcaccctcagaccccattctctctgttcgtccttccttgaccagtctgtaaaccttcactgtttggggatcgtcctgtccatccatgtaaatgtaaatgttggccgagtcggtatttattctgatttttattttattctattatttttctccgagggatgagggtggggggtgtgggaagggtaccacagatcaggccggggcagctgtaggggcgggggcccagacagccaggccgccaccagagcagccccatggggtgccccagacgcgggcctccaagaagccaagtcccagtctgttttctggcatcagacaccggcccgtgttccttgtcagacagacagactctcaggcctgcctggggagtcgtgtccctcagctgcagggcactgtgttgggaaaccattggctgggcctttgaggacacagatcagaagaaagaaagacaactttcctctgcgcggaacactcacacggaagggctggccgcctccctgagccggctgggagtggacgacaggacctacctccccagagcaagggcctggggcttcccgccaaagctgccgcggaaccccgctagtgcgaccaccctccctccgtcggtatgtcctgctttccagctgaacccaaactacaagtgggtttaaaaaaataaacaccaccaccaaaaac

SEQ ID NO: 124 - protein, 590 aa, Homo sapiens
MENSSAASASSEAGSSRSQEIEELERFIDSYVLEYQVQGLLADKTEGDGESTQSHQWTADCSEPLDSSCSFSRGRAPPQQNGSKDNSLDMLGTDIWAANTFDSFSGATWDLQPEKLDFTQFHRKVRHTPKQPLPHIDREGCGKGKLEDGDGINLNDIEKVLPAWQGYHPMFVEIAHTKKLFRRRRNDRRRQQRPPGGNKPQQHGDHQPGSAKHNRDHQKSYQGGSAPHPSGRPTHHGYSQNRRWHHGNMKHPPGDKGEAGAHRNAKETMTIENPKLEDTAGDTGHSSLEAPRSPDTLAPVASLPPQQSGGPEVETKRKDSILPERIGERPKITLLQSSKDRLRRRLKEKDEVAVETTTPQQNKMDKLIEILNSMRNNSSDVDTKLTTFMEEAQNSTNSEEMLGEIVRTIYQKAVSDRSFAFTAAKLCDKMALFMVEGTKFRSLLLNMLQKDFTVREELQQQDVERWLGFITFLCEVFGTMRSSTGEPFRVLVCPIYTCLRELLQSQDVKEDAVLCCSMELQSTGRLLEEQLPEMMTELLASARDKMLCPSESMLTRSLLLEVIELHANSWNPLTPPITQYYNRTIQKLTA

SEQ ID NO: 125 - DNA, 48443 bp, Mus musculus
  misc_feature (1)...(48443): n = A,T,C or G
cagcatgctcttccctatgacgaaccatgtgtctagatacttttactagctctatggtcagatatgatagtttattgtactttaattcctcattctgatgctgaaagaaactcagtagctttgttggtgtttatgaacagtcatgggataaaacaacttcaacccatagaaagatgttttactttcaaatgaatacatattttagaaaagttgggaattacttctgttaggtggacaattacttagatgtaactaaatatgcacaagagacagatatttctggaaaggaaaagatatcctacattaacatgatattcaaaagttttgtgggtgggttggtgtccttttcactccattggggttcctgcctggctgtaagagtggcctcatcaggttccatatctccaatgctgtgtgcctcacggctaaggtcacccctattgattcttgggcacccccgttatcaaggtctctgtttcttcctggagatgctccctacctttccactccaatcagtttcaggtttccattcattctcgagggcatttggccatgtctcctgtccctccccacacctgatccctaacctccaccctccattcccctctccatcccctctctcatccagttccctcccttcatctgcctcttatgactattttattcctccttctaagagagagtcaagcttctttgcttgtgccttccttcttgtttaggttctttgagtctatgtaatgtagcatgcgcaccctgtattctatgtctaatatccacttataagtgagtacataccgtgcatgtccatcttgggactgggttacctcactcaggatgatattttcaagatccattcttcagtttgaggacacctaggttgtttccagtttctgactattacaaataaagctgctatgaaccaagctgagctatgaacaaggctgagaagtatctttgtgaacgggggagcatctttttggtgtatgcccaagagtggtatagctggatcttgaggtaaaactattcccagttttctgagaaactgccaaattgattcaagaggttgtacaagtttgcactcccaccagcaatggaggagtgttctccttgctccacatccttgccagcatggtctatcacttgagtttttgatcttagccattctgactggtatacaatggaatctctcaagtccaaggggatcaatgagctcaacataaaaccagatacgctaaatctcatagaagagaaagtaagaaatacccttgaacacattggtacaggagacagtttcctgaacagaacaccagtgactcaagctctaagatcatcaattgacaaatgggaccttaggaaactgcaaagcttctgtaagacaaaggacattcttaataggtcaaaacagcagcctacagattgggaaagaatcttcaccaaccccacatctgacagagggctaatattcaaaattcataaagaactcaagaagttaagcaccaacaacccaaataacccccaaaatgaggcacagagttagagagaattctcaaaagaggagtctcaaatgtctgagaagcacttaaagaaatgttcaatgtctttagttcaaaacatgatattaaaaaggcatacttatatgcagattttctgtgttcacatctaaattggagatccattttagtagaaaagtttatttgataaggaaagcagggaaagaagtggtggggcaaatatttcttagagtatattttttatttgcagaaagttaagagcggggttgattttcttttttttttctttttttaagatttatttatttatttatatggaagtatactgtagctgtcttcagacactctagaagagggtgtcagatcttgttacagatggttgtgagccaccatgtggttgctgggatttgaactctggaccttcagaagagcagtcgggtgctcttacccactgagccatctcaccagcccagggttgattttctaaatgttaattacaatattcttgctgtagtagtcagatggcatttgtaaatatttgggaacttttaattccttaggtttctgtgtgtaaatttgcctgtttacagtaccttgccacatagaccacttcctcatacctgtgttttggagtaaggaaggcttattgagtaagaataacaattgcactgggtaatgtttactgatgccaatgtgctatactcactgtgaaacatgaacgaatggcttgcaacagttgctgactaggccatcataatacctttatcatacatctgataaaagtaaagataggattcaggtcaccaaccccaaaatggttttgtttttgtgtgtatatgtgtactggttttgatttgtgtgtatacacacactggtgggtgtgaaggtatgtgcacatgcgtgtcaagacctgaggttggtgttacatgtcttactgaattgttctctaccttccttattgagccaagctctcccattgaacctgaacttgccatgttggctagtctagctagctagcacgcccaaggcattttgtgtctcagcctccctagagctcaggtggcagaaggatgccatacccacccagcttttaagcagctttcaggcattcatacccctgtccgatcctttgcccagcaagcatatcacccactgatacctctccccaggttcaaagttttgttttgaaatacataaggaattacttgaaaccaaagcttgaagcactgaattatagaggctgtcataacctcaagagaaggcagtgcatgaggtcatagggagattctgtcctatgatggtcctatggcttcaagggaacattatatgcctatttatgaaaaaatggtgtggggagtgggtgtggcggtagtcccaagatggcgcccgggactgcagccaagtcttataacttgcacctgacttcctcatacacctgaaaataagccacttccatcgtgagagctgcgcaggcgcaccacgacgcaagagcaggccatttgacgaaggccaatgaactgagattacgcggactgggctgatggggcgtagttgaggggttatataagggattgcgattgggggctggagagagattcctgcttgcatgttgaaaggttcctgaataaactgctttgagaagaatgctgtgtcatcgctcttttctgctggttggagacagagcgacaaaaagaaaaagtcagagatcaataatcaaagggtgggtaaaataagaaaattataataaaatgtcttttaagcaaaaatcaatgaaattaaaaaagagagaggaggggaaaagaaatccaggcaaactagaagctgatcttttgtccttttgacaaaatgagcaaaactggcaaacttctagcaaaactggcaaagaagaaaaaaaaaacatactacctattactaatgttgggaattcaacagaggatgtagctacagatcctacattattaagaaggattattaagagactaacatgatcgggttcacacacatagattgagcacacaattgaaaagttccaaatggggcttggatgatggctgtggtggattgaatatatttggcccagggagtagcactatttggaggtgtggccttgttggaggaaatatgtcactgtgggtgtgggctttaagacccttaacctagcttcctggaagccagtcttctcctagtggccttcagataaagatgtagaactctcagcccctcctgcacaattatctgcctggaatgaacctctgaatgtgtaagctagcgccaagtaaatgttgtccttataagagttgccttggtcatggtctctgttcatagcagtaaaaacctaactcagacaatggccaagtgggcaaagcacttgcagcacaaccctgaggaccccagaattcagagccccagaacccatgtaaagccacatcatttgtaaatgatgtatgcctataatccctgtgctactataaggaggtgtgccatggagacagccagcctggagttctcaggcccaagaaaggtagcctggataacaaagaggtaaatgttggggccctgcctgaaataaagtgaagtggggatgggaacccaacattgtcttctagttgcacatggtatgtctgaattcacacacacatgactattgacacatcatacttatatataacacacacatacacacacacatacaaatgatcataactcacccagtataaaacagatatattaagcagtcctttaactagtcaaaaaaaaaaaaaagtctgctgacccatagtagacccatataattacttaactagggattccaagaaatcattacacaaaagtagtcaccaaatcccttaaaagaaggcaacaggtccttgttatataaagctagatccctttattattcaatccttcaaactacagcagctaatatggaactgagagagcatcttctatcataaacacagacacacaattgtaaaagacataaatagaactcagcagtatacacaaaaattgcataccacacacaaatgatgtttattctagaaacacaatgctagtttgatatttaaaacacaatgcatctccttgtaggaaagggctaaagaagggaagtcatatgaccatttctactgatggaaagcaagattaaagctctctccgtccttgtgctagaacttctcagaaagctggtggtcatgaagaagcttttcaatttagcaaagaacacccatgcctctaatcccagcacttggaaggcagggcctggggggtggggtggggcaggaggagacaactctctctgcttctttgacaaagaaagagcttcgtgtattttatgtctgagtgtcctgcctgcatgtgtgtctggtgcctgtgggtagcagaagagggttttggattttctggaagtaatgttgtcgacagttgctgggaattaaaccctggtcctctgcaagaacagactctgctcttagttgctgaccgatctctccagccactcttcctggttcttgactgcagatacaatatggatgtcggcttcccagacatgccttccccacaaggttggaccctcaaactgtgagccagagaaactgtccttctttaaagtagtttttcccagttattttactgcagcagcaagcaagcatattattatagtcacctttcaagatggttctactcaatgagataaaggattgaaaaaaaaaaaggaagaaagagagtgaaaggcataagtcattgtcagatgatatagtggcctaccaggaaatctcaatgcacatgcaaagaagcagagttcctcaaagtgcagactcgaggaaagtatcataactagttatgtaattatatattgaaaatgaatatagggtgtatataagaaaatacagcaccatttataattgataaaaaatgaacacctaggactggcaaggtggctcagtggtaaaaggcacttgtccagcaagcctggtgacacgaagtcaatccttagaacctacaccaaggtgggaatagggaagtaaaattgtcctctgaccttcacacacatgtcgttggcatgtgtaccccctccacatcacagtaataataaggaatacctaaaagcttatgcaacaactgtaatttagatctatacccagtggagcatatagaacttgtgtgatgaaattaaaagagccagtgaaaaatatctaagaacctgtgcaccagcactctgtgctcatagattagaagggaccacagtaaacaattccaacttcacatatagtgttaatgaaaaacattctttaaaaaaatgtgtatgcatgtgcacgttgtttgtatgtgtgccatatacatgaaggtgacattggaggttagagagggctctggggcaactggaaccagactccaggcagttgtgaacagctttatgtgagttctggaaaatgaacccaggtcctctgcaagagcattacatatgttaaacgactcagccttctctcctctttctgaaggatattttcattaaaatttcagcaatccatttgtagacatcgccttccactgcccatctcatctatctccgaatgacttcccttgaattgactaccagagttcagaggtccatttgcctgtcatcgccacaaatgtttattgttctttatctaaatcatataaaagggccatgacttgcttgctttttttccccactttagtgtcttgtgaagatctccatgagcacataaaatgaacaccactcatgtgctttctcttgcaaatcggctcctgtgtttgtttgattgctaggtacagccaagcaacccacattttaattactgttgggcatgtgcagggcatttcttactcctttcatgccttctcaacaaataatgcttgagcaatttgatagaagaaaaaagaaccccagtgtaagtcatttattttattttattttatttaatattcttttttaaaaagatttttacttattattatatctaagtacactgtagctgtcttcaaatacaccagaagagggcatcagatctcattacggatggttgtgagccaccatgtggttgctgggaattgaactcaggtatgcctgtagtccaagctactcaagagtcagagacagaaagaactctttaaccaggagttagaagctaggggccgggcagtggtggtgcacgcctttaatcccagcacttgggaggcagaggcaggtggatttctgagttcgaggccagcctggtctacagagtgagttccaggacagccagagctacacagagaaaccctgtctcaaaaaagaaaaaaaaaaaaaaacaaccaaacaaaaagaaacaggctacacagtacatttccagccagactggaccacatagagaacgccaaaacagacacaaagaactaaataaaaattgaccatcttcaaaattaacactgtttgctttgacaaggactgagatgatgagaggaaaagccagaaatgggttaaaaaattttcccagttctgacaacgaactagtacatccataaaattcttttttattaaacataatactctcaaaactcaaaattacaaaagcaaagaaaaataaaatccagatggcaaataagcatgtggaaagctggttccgattaaggcttctgctttgaacacctattaaatggaagtcaggacaatacaaaataatgacaaggctggcgagcattttgagaagctgggtctctcaggcattgctgtagtcatgtggcatggaagatgacttagcagtttctaacaaactgattattcagatacttgtatttcccaacagccactgtccctggcatggaaaggtaaaatgttacattcacacaaaactcgtatacatttgctcataacaacttttccatagttaatcaaaagctggaaatctccaaaaacgttcctcaagcagtgggtttgaacataagctgctgtgacatgtcacaaccacacagtgaaagatgattggagctgctgtggtcaaagcctgggccctggcagcccaaacaagccaggctcagtcaatattccccaacagaccaacaacaaacagtactactgaatggcaaagaacattaggaagggcaaataaagagtgctagccacctcctcccccctgccgcagctcattttttttttttccgtctgacaggaggtaaaagttaagcatgactaagcagttctggctaagcctagtcactggcccatctcagctcctgtctcccttcaatgggctttgacaacttgtcacaactgtgtgaagtcctcttcctgggagacaagttccttttctggctgacaccagacttgagccctttccttctcccagcatgagagtctatggaaattccaatctggggggacaacgcctcagcaatctcttggctcccaccaggacggttatgccgctcctcagtgaagacagcgaaatcactattgatacagttcacatccgggatggatttcaaggacaatagaacaagtgagaaagctgacctcaattgtgttattgtatgattccatttatataatatggtgacaaaatagtacagggatgagacagattacttatcaccaggtgttaaggataatacaggagggagtgagtgtagttcaggaagacagtgccagctagagctcgtgacagagcagttatgctggggtatacggaggcaccccatacaccacatacaccagtcttaaaactcgagggaaccttgctgtattggtgtggatttcttttgttccctctcttcataacaaggtcttgctatataactaaggtagacatggagcttactaggtagacccaggctggcttctaacttgccatctgcctgtctttgtctctagggtgctgtttttgcaggtatgagctgccttgttttggtacttcgtagttacattaatatgtggtcattgggggaactgggtgagggatgcagagaaagatgacacatctgttccacatttgtaactttccatgaaactatgctttaaaattaaagggaagcagatctctggagttcaaggccagcctggtctacacagtgagttctagggcagcctggctacacagagaaactctgtctccatccaacccccacaaagccccattgaacttcttggatattgttcctacattatattttagttggttgatgtaaaataaaatattcatatgttgtatgtgaaccaaactgattagtatcttaatacaaagaatttaccttagaaatatttctgagtaacaattacaaccagaaatggttccttgtggttaaaaagaaaaaaaagaaaaaaaacagtaaaaatagtttggatgctttgagcaatgcttacttgccaatgagcagctaagggaaagggaacttaggcatttccaagcacctgcagagtttaggaccttcctgatttcctgggagaatcactgatgtgcccatcactaatgctatgtttttggagttaattgccgttgttgaaaagaccaaaaaacaaaacaaacaaacaaacaaactacgaagggcttttaaaataagtaaataagttgtcttctgttttcccccacccctgctttagatatctgtaatttatatatagtattgacttccagacaaaagggtaggggagtgccagcctggggagggactcagtgctgcgctgcgcccagtgttggtccttatttaggatttaaatttacactacagtggaggataagagaaagtctttgccatgtcagggccttgtggcacggaagttatttcaggttaaagaaattattagatgcttctaattttaatgtaacaatttcctttgtttgcctgttggatgagccactcccaatcccctgcagattccagtgaagcaaacggcatggcgcattatttggggccacacatttatttccagatcttaagccgtgacacttgcataagaggttctttcaaatggtccgttctgaagggaaaccacgcagagggtcactttggctcactgcaatttattccaagcgattatcaggatgtagggccgcttggtttaggaaatacgcaagagttaatgtgaagtagggtgtaagggaaggaaactaaggttgagatggagtttgacctggccctaaagcttcctctttacttgggcgctgagacctctgatcacacttccccagctccctcctacccacccacccacccccactggctgctacatgcgcagactcagaaaaccgcctccccacccaaagggctggcttggggtaaaagtgaaaggcacctcttgtagctaatcaacaccacgcgccgggctgtggtggggaatgattggactattggagggcgtcggctgagggcgggagcaccacactggccaatcccaagaggccttgtggtctgtgcccagtttgaggcaccgccctctcctggttctgggcacagggcccggtggagctgggaatgtcccgggcggaggcgctcagacctgatcatagcacaaccctgcacggctgtgttgcagggcccggtagactcactgttccgagatggccgggcagtcagacaaggatgtgaagtactacaccctggaagagattcagaagcacaaagacagcaagagcacctgggtgatcctgcatcataaggtgtacgatctgaccaagtttctcgaagaggtgagatgggcacgcacgctccaatgggacacaggaaagggtggtcccggctgtggatacccccggtgtgacctgggaccgatgtccgaaaatgcgttatcgggtgctcaagtgtttgagaacatttaagaagagggccttccgcgtctgcacacttgtgttcgcttctgagcatgctcacctgcttgtgcacacctgtatctgtgctcctgagtgccttgggttggcacatctgggcatgcccatgggaggtagggaagcatctttgcggtgtgggctgtttttgtaggcttcgatgggcggagtatttgcaggccaaagctggatccctgcgagatgctcaggagtgtcttgaataaatgctacccacttgctgggagagtgcataaccgcgtaaggattttgaaagaaccttttttttttcctttctttctttctttctttcttcctttcttttgctttcgtataaggctctttccatgtagagctcctccattttcgaatggacttttagtatcagcggtttggagacctctggtcttaaaagctatttcccccagagggttccttagggtcgcaggagtgtgtgtgtgtgtgtgggggggggcactcccagggctactttgatgcccagacccataaatttactagtgttcactaagcagagcctgaaggatgtcgaccttaatggattagtgacttgtctcagagccccagcaccaggtgagtgacccaaagactccctagtgtgtgccttgagctcatactaaggaagggaggtaggcagcatggtacagtcagaaaactggaactaaatctttaggctacttcggaagttgtaaaaatggcttaatttagaggaaaacatttcctctggcaatgctgatctcaagattgtagttcttgctgcccagcccaaggggcgttttgtttgtagtctttctctttattccttccagatgcactgttactttgggtcacacacactcacaaggactctgcaccccacttctttccagtaaataagagtgcttattgatgagggtggtttgcatgtttgtttgtttggtggtgggctgggcagaagtccagggtcagtgttagattataatttacctcaagggacatctgctttgcagagaatgttaaatacagaaaaaactgaaagtttggagttttagtttcatgctaaaatacttgactgttaacggtaaaatagggctccagtttagtaaggagtggcttgcagtgtgggctcagatctgcctctgttctgctgagcccagagcaggtttgcatcctagcttctcaaactaacagtcctgtattgttttgcattttgtttgtttgtttgttttgtttttgttttttcgagacagggtttctctgtatagccctggctgtcctggaactcactttgtagaccaggctggcctcagaaatccgcctgcctctgcctcccaagtgctgggattaaaggtgtgcgccaccatgcccggcttgttctgttctgtattgttaagccaagggccaggtgaatgacttcacgtggaattgttccccccccccccaccgccccaccaccatgatatatgtaattcttaaattttatgataaaattcgtcccttgactttgtgtatataataaagtgcagcacttgtaaaaagaaaaagacaaaacgttgagataatttatacgatgcagctgttttaacttgtctcgttgtcctttcagacaggtccctagacctcgggactgttgactttttaggttgcctccctgtcctgtattcagtggatgtcctaacagtgacaaccagcactgtctccagataccgccaaatgtcccacaggacatacagttgctcctgatagagaattgctgcccccaaaataattgtgtatgactttaaaaagtagatctttgaagtaggtaacagggatgagattattaaattatactcagtcattgattctcttaatttattctcatgaggcagggaaggagtggggagaggaccccacagacttattgagctcagctgaaaggctaacaagaagctgctctgtaggaaaaaaaagctggaaagaaagttcctttgctctggctaagtttttggtaccctgtctctgaggataacttgggaagaacacttcttgagcaaaatggagaggctccctgggaaccagtcttctaggacgttgatggagaggtcagagtctttgagaagcacagagaatggttgggtcctgttgaccttaagggttagagggaccaagaccccttcctgcttttcttacccctgctctcactgtgtgtgaatgtctcaccatgttggatggagcaattctgggatcatcaggcttctgggtatattcagactctgcctggtgttgacacttgacatttcgtagcttgctgtactacttatgtacttatgtactactgcttgtttcacacagtcttggtcattggctttccttccctagtgtggcattgcctttaggatctctgggcaccggcaggcactgaacatgactgcttgttcctgtttgggttaccacttccacacacacctcaaacatactgccacagttgttcttctttctagattccttcagtttcaactatgttgttaggtctacatggtttgtctcatgctttggcttaaaacagaaatattttttacaagggtcagagtgtcctacttttcctgacttcctttccttctacatctcaaggttccagaaatttcacgaggcccgtgagctgaagaatatgttttgctaatttacaaatgaaaaaagtgggaggagcatccttcttccctttctggaattttctgtcaccatgagctgtgtctccacaggctctggattcacccatcctcgtggctctgcttttctgttgagggagcacgtgctgtggttggctgctcctgctctgctgcctgccttctctgtgccttagattcctcacaggtaaaggagagacaagcagtgtctgattgcagctgacagtgatttaaagcattgactagtgtagtgtgcatgcatgcctgtaatctcaggcaggagagttcccaagaattagagaggccagcctgggtgaccatgagaatctctccagaaaccacaactaggaaaaaaaaaaaagagtgtttttttttttaacacaaaccaggatgagtttccctgctcatttggaaactgcagccgcggccagacttgagctgtggttccccctctgcggtgtcctgtgtagttgggtgtttggggtgtgctttaggtgagatgtaactccggaaggtgatcgtgaaataggagaatagtagaaaaattatctttctagtcacgaacacagtttgaaggtcacttgtgcaatgtgaactctgtcttccggaaataatgatctgaggtccagaggtgggaatcccacagggaggccatctaaacagcagcagggcttgggtcccgagctggcgtctgcccacaggattataagcctcattgcctagatattttgaaccttttttttccccctagtcctgccccctaggttttgagtttacatttatgaaattgagtcttgttatataagatcatggcattagacaggttagtgatgatagaaatccgagagaccattatttggaatgaaaacaggtgttaagggccaaggagcaagtttgcatttccctgttctgtggttgagccaggtttaagcagagctgtggaagggaggaagagagcatcgggtaagactcctgttgcctttccgttctgggcagtgggtgcccgtaacatctcctaggccgcgttgaaggcaagttgtctgtgctccccacacaatgttttcctagtgatgctgagattctgcgatttttaaagcaagtcttgaatattcattgaaagcatcccgccttgcagaggctgttagcttctgactcacttagcctttttggggtcttgacgaatgaagttttgctttttgtggctgcttacctttcacagatgaagaattcagagtctgaggaccactgtctccctgagacatttaagatgtccacctgtgtttctgagaaatggaagggcataggtctctactctttggtgcggccccgtgtaccttcctttaatgcgtgtaaagtgaaattctattacgtaatgatgtgttttgggtggtgacttaggtatcctggataaataggtagaaaagccatatcttgtaaggctgcacctaagtatcttttaagcagttctactgttggggaaggtgttccttttctgaaaagagattcccgttttgttttaacacagtaaaatccaaaacaaaattaaggcatcagatcacaattgaggcacctgactctgtttgtctttaaggtgatgaaaattttgtaaataaggaagtaaaacaggttatgcaggcaggtcagccagagcaaatagggaataggtaagaggctaatcactacttagtgtggatgtctattattctcaaagactctaaaaccttggagacaacccacaggacctcttgtgtaacagaatctgagtaactggccctcctccatccatgggaacatgactggctctggtgtagaacattgggaaaaataatacatgtgaaaaacacttagaacaacatggaaagagaaggtgttcagacaattaaaagttgttttctttgtttcgttttgtcctggagattgaacttgggccttgagcacgcctgataagccagtgtgctacagcccactccttgagatttgatttgatttcactgtgaagcaaggtcttacacatgctggctggccttcaacatgtgatccgggtggtcagtcctcttacctcagcttcctgagtgcggagataactagtgtgccaccttacccacttccagtgattactgtcttcttggggtgagggtatagcttaatggcagaggattatagaacataatccaagctgtggatttgatccccagcacttgaaaaaaaaaaatctcccttaccaattgtcattaacattaatttttgcttgtgttaagcccaatattggtttaattgataataattatgtttgccagcaaaagaaactacccagaattcaaatattcaccagaaatatgatttttctcggaagatgtctcacatgcaatgggaaatcatctcacttctagaacttttaaactactcagaattcaaatattcaccagaaatatgatttttctccgaagatgtgtcacatgcaatgggaaatcatctcacttctagaacttttaaatataaacttcactgcttgttgggtatgggggaagaatccaccattactgtgaggacctgggggacacacaagagtgagaagaaaattacagttgcccagaattgaataccacacagaacagcctggcaagtgtcctccagtcagtgccacgagtgcgagcatgtgctgcgcttgctcgtggctgttctcgtgctctctgtcaccggccactttccccactcaactctgttgaggatgcaccttagagctcacctccctcctggctgcatcgtgttatgcaggtgtttttttatcatacaggccacttccctcttgcgtggtttgtgcttagtctaccttggttacttacaatagatccttgtggtgaaacatcgtgttcttttacatttgatttccataagtctcaatgatgtacttgggggtcatggtcctcgttgtcacttgcaagggctcacatgctagagattaggttttttgttttctgtttttgttgttgttttgttttgtttttttctctctccttgagtcttttcaggtctctcagtgaccaagaaacttgcttctgatttactcacccccgctaagtgatgcgggtgtgtgtttccatcagaaacagaaatggacagagggatgctgggcacctttaacgtgtgaattctgctactattacagcttgaggatcacacctaacggtcccatggaacgtcagcacgcaccagcaccagcactgactgtctctttgtgcgaagtgctaagaggtggtgatatcaccctccaggtgcgcattgcctggctggccgactggtggtgtagcctgtttgaatggttgcaggccatgtggtaccgggttttctcccaccatggcctgggtcacaaaatacattctctatcttttcactgtgaaagtaaatgttacctatgaattccctcctcttcagtgaagtaataaaagctattgctggggacatttactagacatttataaccctcatatgtaggaggctgtagtgccaagtgcgttttggttataaaacctttgttgggcttagggagattgctcaactcgcaaggtgctacacaaacaggaggccctgagattagtccccagaacgcaagcgttaaaacccagctgtgctggcacacacgtgtaatcccagtgctagaaggcagagttgggaagattcctggagcccactggccacctaacctgcccaactccaggctggtaagaggctctgtgtcaaaagacaatggagacaggggatgtgcgcaatcattctagcttccagcagaggttgttccgcagtctttgttcttgggcactgggcctggcttcaccatctgagtgattttcatctgcaaagggacagttcccacgtgtcaggcccatgtaaggaggctgtggaggatttgtaagttcccacaggtcaggcctgttgtaaggaggctgtggaggatttggagaagcccgttaattggcggtccttggaagacgcgtggctctgacctcaccctcttgctcaacctggagcgagcctttggtatttgttcagttgggatggtggcaccaagagctttcagccagctaacacaggctagcatcactctaaggaatgcaggaatgtttgcagaaggaaacaaaactccctcttgtgcaggacattcgtttcttcccctgtgcttccttctagtgccttcccaatatgccggatttaaagctgggtgactgggccctgccttgtctcttccacttcaggtggtaacactatctcctctccactgcaccccttttgtttctcaaaccagctagacttgtttctgctgaaaacctttgttctttcctccctgcctgtcctctgttcccatggctactgtcccaaaaggcagatatgaggctccatagaaaggtcagttctctgtcttgacagtgacatccctggggggactgaagtgactgcctggctcctctggatggcaggtttcaagtgtctgctcagcgctctctgccctggacccagagactgctcagcaatgaccctgtggtggaatgaaagagccctttggtgggagactgctgtcacccactctctacacctgtcggattttatccccacccttttcccaccagtggcacttagtggtagcattaggatcttttctttgacatagacacttggtgaaactccacgctgaaccgtttatcacttgtcatttctgggacttagttatgtaaatctggcctgttaactaaccaccgagcaaagagcacttgagccaggtcctgtgctgtagaacaaacagcacattcggagccgccttttcctgtctaagccaatgcgggcatgtttactcaggggtctcctttctcagttgatgacatgacaattctttcccaccttctgttttctattcttcatnnnnnnnnnnnnnnnnnnnnnnnnnnnnnnnnnnnnnnnnnnnnnnnnnnnnnnnnnnnnnnnnnnnnnnnnnnnnnnnnnnnnnnnnnnnnnnnnnnnnnnnnnnnnnnnnnnnnnnnnnnnnactgacccccccccccatccaaaaaatgtacctacacacggcttctccagatagggcttctccagtgtctcctctaccatctccacctccgcccttccactctgtttcttcttctttctcttaaaactccaggagtgttttaaagctactcctgccagggttctcctgacattctccatgtgtcagctgaaagtcacacagttgtttcctgcttggcttcctggagaccatcttcccacccccagccccacccccacctccgggctccctggtcacatggttggcctccttttcttccatttccacctatctctgacttcagtacatgacaccccaagccgggggttttccattcttctatgctgtccaatgtcacagcttccaacttattatatccagggcagaaaggcctctctcctgagcctatttcatgtctccactgaggcatctgacaaaattctcaaacctagcatctaaaaagaaacaatacctgcttttctgtcccagactttcatccttctctttgctcgtgccagttgttagcacttgtgccccagtcttcagtctcttgcactccatattaactcctccagaacagcctgttggcttaaagttagaatctgaccaaatcttactatctctgctgctctcactgggctgatccctgccatctcatgcctggccaggcctcctaggaccctgagtttgctcatcacaatagactgacattttagaattaaagccaatttgtattactttgttctgcgtaaacacgtcagggttaatgactctacctaattaaacatcttaggctataactacagtattctggagaatgtgatcctggcagagggacacatacatacatagatcagtggaatagaaatagaggaatccagaaatagtcttgcactaactgattttccacaaaaatctaacagcagctttatggaggaagggcagtcttcagcaaatggctctggaatgactgggtatcagtggtcagaaaagaaataagccttgttctaaaccttcaaagcatttctgtgatccactttgagctaatttttaaccattaccccaaagaaggcatatcttgctgggttggtggctcccacctataatctcatgatgtgggaggctaggattgctgtgaatctgaggccagtgtggactttgtaggccagggtcatgctgggcagttactgtaccactgagttacatccccagccttgtatttgttttctagagtacatgacccagaaacacatactttgtttattacattgttgcatatctgtttccactaacagatgccctctgtgaatcctggagcttttcagccttatttatagatacctcctgatctctagaagaatactgagaagagactcagtatgtgtgagttgattgaatgaatgaaatcttaaaaagtataaaaaagaagaaaactcatagagaatagctattgggtcatattgggtaattcatttcctgggagcctattttatttttcctttaatcatctgcagatttcagtccagttccttattcttaatacttaattggaaggagagcgcccctggtgctttagtgtggaggaggaagccgggaaggtagaatggcgcatggtcagccctcctgttctatctctggtgttgatgaggtagttttggctcttctgactccagatggatttcaggtagagcaaaagcccctctcaggtcaaagtcatctgactcttggtccctgtttttggtagctttgctgatctcagccaagagtccactgtgaccacttcaggctgattgacatctatgtggttctcctgtccctgggaagcgggcctgacccctgcctttcttccctctgcttcaaagtcattgcatcagaactgggggcttctgtgtccttcaggaatcggaataataactatgtctgcaatgttttaacttgcttgatcttactagtgagacagtttagtgaaggtggatgaaacacactggtcagggcgcactgaccaggcataaatacagtcagcattgattcgtggaatggttcaatccaaacgcttactgttttatttctaaaaagaggaatctttttctttcccttttcaaggagagaaaaccacgtagttatctgccagctcacagctgacacccatattacataggtgccctcctcataactgaccttaaagagctcactgtttttatgatgtttctgtgaactttttgagcctctggcttagtagaattgagagactaggagttggacaggctccctggtagaagaagttggcctggccatcttggagattcaccgcctttatgacctaggcacgaattctttccctatctgtctccctgccagggattatgtctctgactcttagtctctcggaatcatggtagcagcttaagcccaccatcttggtgataaggggagttagcaagaatgggggttgcttggggtttggtgctagaattggctttcaacaatttactgggagtagggtcacagggtggtgaagaagggaagctacatgattagttgaacagccttgggtgccagactgaatactggtaggctgcttcatcttcagtttgagggtcggtcatgggaggtttatttacaaagtgttgggaagtgatatctgcctcgttctctcccctttcttggtagactggagaagcagctcagcaattttgcccaagatacctgcatttctcagtaacacctcaaagtcactattgtctatctgtctgtctgtctgtgtctgactatccgtgtgtctgtgtgtctgtctgtctgtctacctatccatccatccatcatccaaagctccccattctttctgtcacttctgagctctcaccccctcccctttccatgtgtatagtgaaaggtctcatgttgggaggcaggggtgctgaaaatggacacggagacaaactaaggagcaatgtgtttattgaagagttactaacgccacggactgtcagtcagacagcagcatggtggcagttctaaggagagagagctcaggccctggtggcagaggcagcatggcaggaactctgcagagaggaactggggcccgtgtcttatacttctctcagagtggaggaggttccactgtgcaagcccacagccaggcaggaggcagggaggagggtggagaacaaatggcctttgatggggctagtgttgggggctagcagactgtggctccgtagggtgcctgcactgagaatccggaaggtactgtggcctgagtgacagctggagtctaacaggtagtttcctccaggttaaaacggtccatcctgaagggaaaggggaggctaagaggctcaggaaacttactgctcccagcagggtcacctgaggagcaaaagcttgctgaggaaaggaggtgtagctgcctaaaaactgcacagggagcccacatgtgcagctcctgggagtcctcctcactcatgcagggtgggctttccggtgatgcacctgtaatgccaatagatccgttataggatgatttcgctggcctgtggtcaatgctcctcttggggtaaatagacttgtcctcacatctccctgagacaaatcactcgacactcttctactagctgggaaaacaaagtagggacactagtgtcaactaacagtgacaagctacatttaagaaacgccagctctgtatcaagaagagttcaagtctctccacatactgagaagctaaaagctgcctatttgtaacatcttcccaattttaacaaggagcgagaatggagtgaagacgaagctgcctatttgtaacatcttcccaattttaacaaggagcgagaatggagtgaagacgaagctgcctatttgtaacatcttcccaattttaacaaggagcgagaatggagtgaagacgaagctgcctatttgtaacatcttcccaattttaacaaggagcgagaatggagtgaagacgaagcccttccagggtcagggtttgccacacaggcagtactgggtcagacacacatgggcttgcctgcagtgcctataatgtttaggctaattattttttatgactcggagtaaagcactgcgcactgtagtcttaaacaagagacatgtgctctcactgaggttcttattgtgaagggcaatgtcatctggtccctgtgggacatcgtacacatgccactttgataactctagtgtcctcatgaaggaagcaatcccaggatctcttcccaggctgggtgtttttcaaattaaattctttccactagagtcttatttggaaaggtgtagggtgagtaggtcacggatggctttggggatgagctgatgtgttatggtcatgcttttaatagctgggcaaatttctcacagcaataacttaacagtaagtaattacataaaattcttagtgagagatgaaatgggaatctgagttgttattggcgctggccaaaagtctctaactagcacttaattcattatggggaaatgttgctcagtgacaaaaagtgatcaagtttgtgatattgtcttcctttttagaactcttacttttttcaatgagccctttaaatatgtgatgccacactagctcaccaagtgccatgattgggaggcccggttaatgccatcggggcagccccaccttcccgccagagattctgaagagtgcggatcttttcttgtctctttgcctatttgaaatgacccatctttgtttgggtttattgctgtcattcactaaatgctggctttcctaccctatttatatttctcatttttataggtagacccttttacaatatattgctgaattttgcatttaataatataaataccttaaaaaaattttaaagtgagaaagttaagaaaccactttggatacttagtgataaaacaacgcttaaagcagtaacccttaatttatagtaaaataatatgaatgaaatgttacataagctttaattggattattttcagaatgtcctcttgtcctaggattgggaagattgtaaagcaggtttgacttgatcctaatattcatcccaaagtcacagaagagtcacttggcctgtggctcacatgtgtggcttttccaggcgtgactcagctacaaaagctctgccttctgaaacgttgagagttgtgttaaagggctccattctgggactgtgttgaacatcatggctatttgcaaatttctaggagggtgaatttaaaattactacaaaaaacaaacacaacaaaacaaaacaaaacaaaacaaaacaagaaacctgataggttaattaggttgattgagtcacttcaaaatgtttatgtattttagaacattatgttattgcatgcacacacacatacacacatacacacacacacacacacacacacacacacacacagggagggggagggagagagagagagcgcgagagaacctgaacttatttactgtaaagctggagagaaattgttttaacattaacaaagatgacaactgtgcacctcctgtgacatgggtccttgggagccatgtgggtcatcatatttgccctgtcagggactggtcatgctgcgtgtttcggacccacgataggtcaaaactgaagctgtaacaatgaaggacatgggacttctggggtttgtttctgttttagttttttcttttagcccaaatgaattacatgcttcttcaggatcaagtcaaatacttttatttttgatttttttttttttttcctctcattcaattactactaacaggctcagccattcggtcagacaagattgggtgtgttctttcttctatgtcctacagcgctttatacatagtagatctgtttttgcccattgatttaacgaattatcagttaagtgtgaagtcctgtgacctgaagggtgaggactatagctgctgaggggaaggagatttgtctgggctgtttggagaacgcccagctcctcagctggctgggaacgaccgtaaaagtaaaggcctgtgctggtcttacatgtccagtcagcacatacttaagggccttgaagcctgtggcaagcacagatgaatggcataggctgaagtctgggtcgtgagggatctcacaaacaaattgataaatgactcgaaagtgtaacagtgtgagctgggaagggcagggaagggcagggaagctgggcggccatgctggggtgggaattgaaggacggaacctgagaagtggctgtggggggtggaggccatggccacggccactgggattgtggtagcaacgttttctgaaaacaaaaagactggggaagattatggcaggaaagaaaaatattatgcttgacattgtgtgtttggatgtcgaagagagttttctcgtggatagatgtgttaggagcctggcaccacgatgtcagagaggcggttactcagtggtactcatcagtggacaggtagtacgcaaactggagatgcgatccccaggagagacactgcaggtggagcaggaacagggccaaggactgtgtaggagaacgggtcagatgaaggcggcgtttcaagagatccatgattagaaattcctctctgagagccagctgaactttcaggaggtggtagccagcattagctctttgtgatacagtttggaaatgcttgggactaggactgtttcaggcctccagttttggaatattggtatatttacagtgacatgtgagggatgaggctcaccagtatgaaactcatgtgtttcatgcacttcttgttgtgtttcatcataagccttttgtcgtgtcaaacaccacaaattagagttttactctagtaccttgcttctgtggaaggggaagtccgatctagcacacgacgctattcgtttttcaaaaacagagatagacaccatctacatttttctgatgccctttaaaaacaaacgccaacacaagcctgttgtagctctgaatgaaagccactaacctggaaagaagtgcagcatcgtttccttccgggcttcagaacccagctcttggcttggggaacagaacaggtaacacccgtctttatcggaccttgcagatttgcacctcagaaattttgaatttgaacaagagacctaacagggaagtgagcaccctgagatcgcatctagtactggagagccctgtgctatgtacatcactgcagagagtatgaaccctcgtcagcttcggattctcccaccgtttctcaagccggagccctttttctttcctcctaagggggctgagctctatatagatgtaattattgtaattgaagagttccagaggttcttctgggccccttaacagtcattcacccctccggagtggcgcagacatctcgagtgctgacagccacgatgctgagaatgctcttcatccttgcaggacacgtggcaaagccatgtccttacacagatcacctgaataattttatataatttagtatgtttatgttttgatgataatcccttatgtgaagtcaaattttagaattttccaattggggtatcatgccagcactcagagttggaggtgtggcagcaaacttctccagttatggatagcgctaactcttagtatttcaaaacagagttcctatttattctcaaaaagtgaaggctatttattggtgttccctaagctctgagagttctcatgtactggcaggatcagagtgcataaagacagataaagaagttgggaattcacaaaaatacatggaaggattgtggtctcacaagatatgtgaacagagtacatcggtaaggctgcttcaacaaccagattagacctggtctctgtgggattcctgttcccagctcctgcagctataaggctgaggtttgagtcttctaagcatccagttatccattcctcagatatctgagtcattcctcactaagtgggagtcctgtcatctgtgagtcctgactcatacacttcctttcatacctctgtctcacatccatccattctgtgtctcaccctaactcctacccttcattnnnnnnnnnnnnnnnnnnnnnnnnnnnnnnnnnnnnnnnnnnnnnnnnnnnnnnnnnnnnnnnnnnnnnnnnnnnnnnnnnnnnnnnnnnnnnnnnnnnnnnnnnnnnnnnnnnnnnnnnnnnnnnnnnnnnnttcttccatctgtttcagtgacttaccattgctcagcagataaggatcaagatccttgaagagacctggaagcccttccactggcctggcctggcctggcctggcctggccctttccttcctgagcccctggctggcttctttcctgaccctgaactcaggatcccatgcattagaggatctttctgctgtgaccccagtcctcacaactccagttgtgtctgctcttttcttctccattggtgacattccttgtttcatcatggtgacacccaccctgtgattttagacttgacattcatgtgtggttaacagttgggcattgttcatgtttgcctgttagactatggcttccaggggcaggagccatggctgtctttgtttactcttgagtctggtctttgggggcacaacaccaattatttgtcctatgaattaactagagccacacactgaaaatgaagtattcctttgggaaaatggaaaccttcacagaaagactggctgtgtgtgttttcctctgcgctggtatcccttcccctccttctctccaggttctacagctgcctgcttctgtcagagttcagtgggtgagaggagacttctgacgtggccgtcacctgcacccttgttctgtctggctgagcatttgagcagaaaaatcagcaggtgctcacaacgctgcggtgctttcgtagctttttctgtgggtcactcctaaattctacaacgtgcccaaaaggcagggcacgcacactgtgtgcactgcagttgtttattgcagttagagtcttatactaacaatgcctgtgcttgtggaaactgcagcaggtctactagcgagaatgagagagtaccaagagaatcgctaacttcccgacagttgtgatttagactctttctctatctgtgtgcgtctcatatcttaaggaaaacattagatattacaaaacgttagtctctttgttgtcttagcaagacttgaagtttatttaatcttacaccaatttttcaggctttgattttctttttaatttttccaaaatggtttttagtgtagagttaaaaatattttaacatcaatcagtttatttgtttatttacacacatacatatgtagcagtggccagtgagaccaacggcccaaagtgttgtctctttttcccttagaaagggttttaagaggagcttcgggtgagcacgcctttgcctcctttcctttcagagcttgtgttaaggactgtccttttgcgcccttaacttccaggttatgattatgatgtgactgtggtagaacatactctttctgcaccacagcacaatcagttcaaattctcacaactccataacagaccaaaacgaaccccaaaagaccatcgcagagccgattctgatgcaattgcacctgggtctttttccaagcttgagcttgggcccactgcagtcactgacacagcagggcagcagggtgaagtccagagccctcagctggataaagttttataggaaatggcgaacaagtgagcggtgtccagcctggcaagcatctaatttgtaagctgataggtgggtgctctcaagcaaaaccaataacagtcagaaagtacacctggaactaccaggctaaccctgattagttattgctagggagtagctaggaagtaactctacggtatgggcagagacaagctatgtggttcttcttggatcttgggtgcagcttgcgttcagctgcagatcaagttctcagaccctttttcttttaaaatggaggcctgtcccaagatggaataggattggtctcttgatgacatcacctcttttgtgtcattttggaaaacaggctgtccctggtgcacagcgagactcaagcagataagctgatgttcactcgtcctgagccggagtcccaagttggcaaacttgtgaactaggtcatttgatggtgaccagtggtgtgctaccagtcaccttcacgctccaaggactctggtcacttcatgtctcccacctgcctgctcctcagtcagataaaggttcacagttccagactatgccagaatcagaaacccttgattactatttccgtgcctgtgagttgcctttagtgtcttatttgatgcttgtcagatttctcgttgtcagaacgacaagaggagagcacatttcggagaactaggggagtgtttatgcaatgcgagaagtcatgtggacgacagatacttatattgggaagtgtttcgtatagaaactgttgtgtttattgaacatatggtatgtgtctgacacgttttaaaatataccctgcaaaggcttcgagataaataccggcatttccttccttttataaaatgctctgtacatgtgtgtctgccacacgtgtgcagatagatgcacactgatcccccctggtactaggattataagtggttgtgagccacatgagcgctggtgtctgaatctggttttcgccaagaggcaaatactcattaccactgagccatctatccaaccccaactactagtattttctcaaaagtgtcttagttggtgttctattgctacaaagagacgccatgaccaaagcaactcataagaaaaaaacatttttaatcagaggcttgggtactgtgtcagatgcttagtccatggcttttatgacaggaggcagacaggcatgacactgaagcagtagctgaggccttcacatcctgatctgcagtcagcagacagagaggaagatgctgggcctggtgtaggcttttgaaaacttaaagcccatccatccccagtgatacatatcatatatcaataaagtgatatatcaataaagccacacctctgaatcactcccacacagttccactaactggagaccaaggatccaagcatatgagcctacaggtgtcattttcatttaaaccgccatgcctagtatgtagtaaacacttgggcagtatagtctctgtctccctggagcttcatctgctctgtatttagtaaagctttagtgctagatgtgtccaaatagagaagtgtaaggaacaggcacttttttttccctggattttttgagacagggtttctctgtgtagccctggctgtcctgaaactcactttgtagaccaggctggcctcgaactcagaagtccacctgcctctgcctcccaagtgctggaattaaaggcgtgtgcctctactgctcggctcttgccctctgtatcaacaatgaactgaagcaactcagagcactaaagtgattctgccaagtgaaaggttcttcctgcccacctgtgcactctctctctctctctctctttctctctctctctctctctctctctctctctcttgctctctcttgatgttccgacaacagttacttacattcctctagaaagaatattgggcctggcctggcctggccttcctgcctgtccagtggatgttgttggttgcacattacagatgtacatagtgtgtcctgaagggaaactttgtgctctcctctctcacctctgaccaatggtctctccttggtccacactcatactgagagagtcccaagtttgacatcttaagtagaaggctaaagagacagtttagcaacagttgaagggggcaagtttggggagctttctggaaaagcagaacaaacgttacagtattattaaggctacccatagaacactggtgttgggaaggttctactgtaccatcccaaaggaaatggagagggagtggtttagcgtccactcaatagatacttaaagtcggccatgtgtgacttctgcagtgggctatctgatcagataagctgattccttttaactcatctgactgaaaagattttagtattcatacaacctgttctttgaacagcatcctggtggagaagaagtcctaagagagcaagctgggggtgatgctaccgagaattttgaggacgtcgggcactctacggatgcacgagaactgtccaaaacatacatcatcggggaactccatccagtaagtcatttcttggataagtttcttcttctcttccaaggctactgtttgacattgggaggtgtagatttgcatccacagaaaacttaaaatggaatgggcagtttcttttgatttagaatacttcatttgtgacaggctctcaataactagcccaggttggcctggagcttcctctggaacccaggctgacctggaactcacttctcaggcctttatctctcaagtgctgggattataggcatgaatcacggtgcttaacaggatacctttttttttttttttttttttttttttgtgataaatacattgattcaacctttctttactttgcggtttcttttggttgcagttattgctgaactcggggtcagagtgctgtgctccaaggccttgcactggggaatggtactcagcctctgagagtcaacagagagagattcaaagggcagagcatcagtcatgtagtttgttcttcagccaagagagtgaagagtggtcacgagtacactttccctaacaagagataaatagccaatagccccagctcaagtaggcaaaccaaaaaacactttaaaaataagtaaatgtaggcatatccctatttatttatgtatgagtcttgctgtataagaacttgtaagaactgcagtcttataagaactgcaaatgaaggaaagataaaagcaggctctttttagaagccctagaaatccattttagtgtaaattctgttgagcagtgtgtgtgtgtgtgtgtgtgtgtgtgtgtgtgtgtgtgtgtgtgtctacttgtgctttgcctctttggttaactgggaggttatctgtacagagagagtctgcttcactctctggaggattaacagaccacacgttttcatagtcacagttcccagaactagcagggttgattgcatctgtgaggtctgtccttgtaaagcccctccacatcctgtcctgttcccgcaaggagggagggtggctttatttaggtcacctctctgcaagactttcctgtggggagcattttgatgcccttggattttgataccttcagtctgaggtttaaatagtttatagttacattgttgggaggttgcaggtttctctgaggccatcatggcagaaagatgcgtacctccatgaatttaagagtagagaaggaagggacaggtttggtcttcagttattgtctgaattaaaagtgagttcaacactagcaagcctctgaacaccccctcctgtatctcagacagtcatggatccgttctaaactctgggactgtggatggaaaggcttcctgccctaactctgctgttaatttttgttgtcaaaccaggtggatcaaattttgcatttaactttgccgaatgccaaacaaacgctaatcattgaatagtattttttttttttaattctcaataaaaagtcagcttttgggaaatgagactttcacggatgtcctataattcttaatgccaactccctttttatcccttacaggatgacagatcaaagatagccaagccttcggtaagtttgtccaaatatcccaaaggagaggtgtgtagaggtaactatgcatcttcatgtatttagtaccaaaatggggcaacgatcacagcctcttcagctctttctaggcaaggtgaatatgtaacttactggttttgcaaaagtttggtttgggaggtttttgtttgttcgtttttttgttttgttttgttttgttttgtttttgtactagtccatgtccttttgaggaaagcttgtgtgttactttgtacaacagaagtattaattttttaaacatcataattgccgataaattaaagtccagatgcatagctcagtggaagatacttgtctaacatgcatgaaaccctggctttacttgctagtgctagagtaagttaagtaaaacggtgcctctgctctgaaagactgaacgtaagccgtatcttgagaggactaggaactgctttaagctgagtcctgctttcctccctaactctgatgaagcccagaccgcttccttctctgcatccctgtcttcgtaggcatccaggaagggctagttttacactggcgtgctcattaaatctagagtaagaagttatgagaacagccagctcaggttcctgaaaagtgtaagcaggaaaagttaattctggcctggaataaaggaaggttttgcttcaaaaatggcagcaagaaaactcagcttttctatttttgtctgtgcttcttctcggtggagaggccacacatggcgggcgagcttctttgagcttgcagtaactactggacaggcagtccactgcgaggcctctgctgttttcagtgtgtagcataaagtgtgagcacaaatgccgtgattactccaactctcacccacagcaagaaaaggcctgtgtgggcttccccgggcacagcaattacacttctgtttccccctgttcaaaacaaaggacacacttaacactagtgatagtagtgcgttacaaagatttaaaaaaaaaatggtgttgggggagggaaaaaagaaaaggaaaaaaaatggtgtttagagtttgaatgctgtctgtgaccattgctcagaacgtgacttccgtgtcttctgtggctgctttatcgccagctgcagttgtagagcacctaattgttgtccccttgaggtctgtcggagaaaaagtctgtttctgtcctcttacatgtttagtatgaagtggttctgttgtgagtcatccgcaggaagacaaggctttgcggaggtttctttcctgtaaccgtagtgcacgagcaggtgtgcacctcctccatttgttcttagatgccttcactgtgcagctgggcatctctgtccgtggagtgctggcttagcctgtgcgagagcctgggttcagtttccaacaactggctggctgtcattctacttacccctaatcccgagtgcttgggaagtgactacaggaggactagaagtagccggtggctccatagtgagcccgaggctggcctgggatttacttaccagcgcctgtcctaaagggtagtgtcaaggggaggaacccaagtgtcctcgctgtgtttgctattctctgttttgttttagttttctgtttgaacttgcaatctctttgaggtttggagtggctggtgaacagagcacacttattaacatcagccttgatgaaagtccttctgtccgtgtttgcaggaggggacagctcgcagtaacacgtcatttcatcatgtgtgatgtactggtcagagcctctcccgggtctgcattgactcgctgtttaaagcagatactcttactatcaagattttacaaagggatgactttgtggtgtcagcaaacaaataggacccctgtttccagctgtgactttgcttaaataggagcacagatggaagaaagtggggtggcccttgctggtgatttgagaggctggaagtaagtgacacagaagaaaatgtgttgcagcttttctgggtgctttgctatttctgccaaacaatactggctccttaaggatttctcggggtcgtgtgtaatcatctgtagctggagaacgtgttctgtggtctgatgtttttcagtaaacacgatgctcgggactgagctagagctcagctgtagagcacttcacaaatatgcataaagcccaggtgtatgcatcagtcctcagtgttgagaaaggaagtgttacttaaagcatcgagtttaatcttgaaaaagatgtattagcgtgaacttgccccaaagaacctacattgccaagttaaggtatttatagacacagaaattacatgtctttaagtgtatccacagcaaccaaatttgctaatatagagggtataagctgtattggtggccttccgtgctattaactttcaaggccccatgatatacaaggttgtatttgtctctgaggtccccagacctcgaggccctgaagctctggggaaccgctgcatgagagtcacatgcccagcctctggcttgtcagttgtggtctcttaggttccaggagacactggactttcaggaaggctcccctgcgagtacttccaataaaggagagttctaggttagatggatttaagttgggataactgatttgcaaagactttggagacttggtgtgtggttttatatggaactaatcatgatgtatactggctcacatgatgtttgtaggccattatgcatgccacacacagtcgctatcctttttactgtaagttggaagccttccaggtttcaaggtaagtaggtggcagagctcattgctgatctgtttgaaaagttctctgcctaccttacagttgagccctgcagagaaatccatttctgtaccctaatgctgagtggtgattacagcttaaactcaagcattctgggttttatggctatgaagaaaatagacaatccaaaactgtgtggttttttcttttttaagttctattttttggagggtcatgattgccagtgatagtggttgtggtggcatgctagcagcattttatttacgttacatttaacattttaaaatatttatttgtgtgtgtgtgtgtgtgcgcgcacatgcttgtgcaccacagcatacacacagactttagaggatagctttcaggagaatcgatactccttccaccttgagggtcctagggatcggtgaagctcaggttgtcatgctctgaagcaagtacctttgcctgctgagccatctcgcccgcccctgtgacagcattttaaatggcataggcatgtttgagcctcagcaatatttaacctgacatcggtgctttttcattagcaatgcagacaccaagacaggggcgtcaaagaaggccacctgaagttgcatggggtctcctgaaatgcatccatccctgcgtgtgtcacgagctagtggcctctcctgtctgccttctctcactaacttcccagcatgccgtagtgtcctccagtgagccctctggtgtctcacatgattgtgttccttgtaactgactggtattgtttgcgtatttaattgtcataatcactgttaattatactcacgggacataatcctgtggtggctgtgaattctatagttactaggatttaaaattgctaaaaacaatagcagatgtgaagttttctttttaagtgacattttttcttcccccactgtgtcaggaatcttaaaggtgtccaggttggtgtgtgctgccctgctgctttgctctgcgtccctagaatggatttgcctttcctgggagtctccctaacatgccttgcagagacaccgctgtgccttgctgcaaacagctgcttgctttactgacgttttttcgtctacagagtgctatagacatgattttctgatgggtcgagcttgcctgtagctgcttctgttgaagcactaacagttttgctggtgtggaacataacaagagtgttttctaacatctgctaaagcctaactgtgtgtgcttccatgggctgagtttggaatggtttgagaatatatgcattttttttatggtcttcatgagaagggctgtgcccagaaactgctggaaggtaaacactgagctttatctgctggttaggcagaatggtttctgagttaatcgggtcttcctggtcctatccggtgagttaaagaagactcagaaaaggtggtctaacacgtgacatgacaattcttattacttcattctggttggcacactgttagtataatttaggtatgtttttatgccctgtcagttttgaatgaaataaatgacatttatttcatattctatcctttgaagaatttcccttccaaaagacagtgacgcagtcttctatgtgttcatgagattttatgctgaagtttccgtttttatgtcgaagtccttaaaagtgttaaaagtgtgaattgttgtatgtattctattaattaacactttcaaataatgaagtttatgttcttaagtaacttaaatataaattttactttcttgaaaaatggtgaaattaggctctttagtaagaagaatttgggcacaattttgccttttaacaacttttaaaagatagagttgaataaagtaaggtgattcttatcttaaaacaggatttcagtcaggggaataaatgctcagacgggaccctaactccatggtttcttttgtgttccaggatactcttatcactactgtggagtctaattccaggtacgcagtgctgtctttgtttcttcggttgttttgttttgacataaggtctcttggagggctcaggagccagagtttcctgacctccccatctgatcctatgcttggatccccactctgctcttagcctccagactgggcgtgtgctcctagaacttcagggtgttccatcctagactgtcagctggggctgcctgcacttcccacagtgaccccagataccatcaccctctggatatatccataccaaggaccatggagaacaagtggggttccttatccccgtggcagccagtcccttgacacaagagcaccttttaagactggtcattatgtttctgcaagcttggctcggttttcagttgttgttattcaagctgagcccactaatccaagtgcagggagactctcctgttacaggggacagatttcctcgccgtattccagcccaagcttgttttttttggcagttctgccgtgttgacctatataacaatggtcttcttgttgttgttttcatttttagactcaagcccaaagctacacacctgtatttcattctgtcaaattgaaccgcccccctctcagtgtgactgcctgctcggaatattttagaatacataccaacttctttaaactgcaggttccctctctctaaagtgaagctgaaaagcctcactccatcccactcatttggagattatacttttaattctttcagactttacatcttttaattgaatttgttctttgagtgtattgatacatgaagattatttgagattatgaggaaagatttgtgtatgtattcttgggtgctaagtgtaggtattaaattttgtccaataaaaagttgaagtatagaaattgaaatcaaatttatgatttcattaaagctcttccaagccacatccttgattttacccatagtctctaatgtatcacctatagaaagcttatacacactggatgatgtataaattagaccagccttggaatttgggagtagaccaccgactaagtacttaaggcatggcatttctcgaatggtttaaatccatctactatagatgctaagattgggttttcagaggaggatctgagaatgataaagttgaggctgggtgcagcctcagaactcaggtttctggttgtctattctggtgtgggaggtagggctcttggctgcagaggttgctgacagcatactcaaaatgagaacattgatctgattctcatcttagtgacattaaaatgcttgtttagtttatgtgggagaacaaaaggtgtcaggacctttcccctttgtgggcttatgattgggaacccagagtttagtttcgagcagcatctgttgaggaagctgttaacagctctctgtatagagtccatggaagatgatggaagcagagcaaggtgttagtttctcatggtgacaatagtggagagcagcgaggccagctctctagggcatgcattgtgcacaagataatgttagcaaaactgagctgcccttttttgccaaagtggttctagaagtaaggaaaatatgctgtggtagttttccatcagaggaggcagggggtgaggtctctgcattgagggtcactcaagcatctttttgctcatgtgtctttctagttggtggaccaactgggtgatcccagccatctcagccctggctgtagctctgatgtatcgcctctacatggcagaagattgacttgtctctccgaagccgaagaactaaaagactgccccagagcggggagaaaagaagccagtgttaatcacttccactgacagaaacctccccctgagaacgtaattgtaatatatctgtttccctttcctcctgtgctagtagaacaaacaagggactctttgtactcttcaacttttcaaatgtgcctttttactcaacttcatggtgatgtttcttcactacataatttacttattgtaaacacgatctttttaaaatatatctggcttgtaaagtataccatatgtgtctgtctgtttggtgtattttatttagtgcttagtgtttcagattatttaacagaattgcttaatgtgctaattattcacaccctgttgtctgtgtctcgaagtaaagcagcagccctggtgctagcttgttcttgtcttaattgctcagtggtaatcgcaatcagcctgcatgtgcctatttcatgtttctgtattgcattcctatctctgacaagataactgaatgaagcaaaggacagaagagaagaatgtaagtctccacaccgccaggaggacttggtaggggttagtgtgcaggtctgtggtagcatttttggatagcagagagctaaggacagaaacagaagtgtgttattgtcttgaataatttattcctgctagctaggccatagaggcaaaggttctacaatgtcctgagtgccaccaggtgggacccaagtgttcaagcacataagcttgtgggggtacctttcccatccaaactgtaaattgccaatgtttttcaaaattaagagtcagaaattacatctcaaagactgataattttctacttgaaatgcatgtgaacatggcctatgtggtctataaaagagacagcacatgttctgtgtgtggcaaacaggaacacaaaccagctcacgcactgacgaagactcttgttactgcctgttctcagttgaaacgtcattccccagagactctcagtttcataaccttggagttctacaaattccccatccagagacagaagcagtggatgcactcttcttaggaaatactggctaagtgagtcatcaaagcacagatctggagatacttattttgtgttcgtttcttgaagaacttcagctgctgagtgaggctggagagtctggggtgcctctgctcatttccacactgaaccctcaagagttggttccgatcacgaggcttccattgctgtctctgccagcatattgttaatatccatgacttatcatttgaaatgtagaaacccaagggagtcatttgctagttgggaaatgaatctgtacgcatctgtgattgggtaaccagccttaacagccttaagaaatagcacatcagaaaggaatgttcctgttgctacagagcatgggttgtttttaaaaatacttttcagttttgtttattgtatgtgcatgagtgctttgcctgcatgggtgtatgcccaccacatgggtgcctagtacccacaggggccagactgtgggaactccttgcatgagttatgagctctcacctgggtgctgggagccgaatccatgtcttctgcaagatcagcaagtgctgttcactgctgagtcatctttctcacaccactgagtacgaatggttttatagtcagtggcatgcatccccctttcccaccattccatggtgctgtgggtcagtgcaaggccttgtgcatgctgagtatatgctgtgtcactgagccatctctgactccttcagtgttgagagtaagtatacatcaccatgtccagattatacatgggctgggaatcgaactcatgccctcatatctgggcagcaagcactattttccactgggctaactgtagctaaagctaacaacgctcattcttgggggatgcatcatagttcatctaagctgtcagtgtttctttatgaaggaacaatgtagtaccgaggaggaattgctttatattatagtttgaacatttagagtttgtacagccaaaatctcaagattttgtgtgtgtgctgcatacacacaagtccttggtcatgtgtacgcgtggagaggacgtgagatgtctcctctagcgttctgcctgttgccttgagctagggtctctcatagaagcagaagcttgacgctttgcttagcctagctggccagtgagctctttggattcacctgtctgtctccatcttccaaagctggggttacaggcacaggcaactgtggattcgaactctggtcctctgcttgcagagaaagcacactggcctactgagccacctcctcagtcccccattcctcccatgttaatttataatctttttcttctactgtgttccattagagtttaaggggcttccatggcttcacattgctctttattactgtgtcatatcatagtggagagtgggcagaattccatggtatgtgcagcagcctctgtgttcccaggaggaacccagtccctggaccaggtatagcacatgttccattcctctgactcggtgacttcctgtgaatactgtgtggaacagatcagtctcctcgtccattgggtgtctggacaggacctgtagaagctctggggagtgggcgtggggggggggacagttctcttatacggtatccctttgaagggtgtttggatccatttccaaattctgagcttctctgtggaactgtgctaatgtcctgaggctcttctaggacaaagtaactcaaactctgatttaaaacagcacagatgagtaattctaatagctctagaagccaggctcttgacagaagctttcaacctggttcctttaagatggacacatttccagtgtttcttctagcttcctgcgatacccttacaagccctcaaatgacattttaatttctgcctcatttactaatcagtgaaatttagggtcaccctatgctaccgtgaccccatattagtgatattagtgtttgtatcttcatatctctgtattcacacacagtcaaaggacttcttgtttttcagggacacaagtgtaatacaatttccactccctttcctttcctcttctttctcttaataggaatcccagagcctttccagtttggccaagtattctaccactgaattataatcctgggcctgatagtttaacttctgacttaagtaaagaacattgtttgtttgtttgtttgtttgttttttgagacagggtttctctgtatagccctggctatcctggaactcactttgtagaccaggctggcctcaaactcagaaatccgcctgcctctgcctctgcctcccgagtgctgggattaaaggcgtgcaccaccacgcccagcataaagaacattgtttaagggagtgttagtggacagcaaatctttttgttgccaggtggtctgtgttggtatacattattgtgtgagctctgcacctaggtacactagagtctcttgaatcagattgacctaaatataagtctactcaaggatgaagttatcatgaatgccatcaattctattcttcatagagaagaaaaaagcgaaacaatcatacttattaatagactgggtcccctgggggcagggcataatgcaaaatatgcagataaaaaaagactctgcaattcagaaaagactaagacttgctatgaaagtctcagggcccaagcccaaatccccaaatcctatataagctgctggagataattatgtgcacttgtgaccctagcactgtggaggtgttggaaccaggatcactgggttcctccaggtgcagggagtggcagtgtctcaatgcaagagagttatacatcctacatcttctgaccttcacagcgtgcatggaggggcacacccacacacatatgtatacactgcacccatgaatatacacaggttaatagaacagaaaccattaaagtgacatatttgccatttttaggttaaaaagttcaacttgttttaatgtccttggagccacagagaattctgcaagtagatgaacaattagaagcttgagtagcccttgcgtttcctcatcgtttggccattaccctgtgtaatgcctactctgcttctgaaagctcttgttttgtgatctcaataccttgttgctgaattgatttattttctgtgattatacctgtcatgctttgcaacctaataacagtttaggaacagtccttttgaacatcagccagacgagcaagatgcattatggccatgtgggcttagtaggtaaaggtgcttgcctccatagaaacttggtctcttaagttagctcattaggtcatggtagagcgacagaagtgactcccacaagttcctctgacttccacctgagctgcactgttaacatcacacacacacacacctaatagtatggtcagtgcatggtatagcatatctcaaaatcggaaagaatatgaagtagaagatgccaaaggctacattttgtgtaattccagtattcagagcaggcaaatctgtagacaccatggttttctagaccttcaaaggtcagctggggagcaaagatagtagctggagatgggaacagagtttcttggagaataatgaaagtgttctgacttcagctatggtgatggctgtgtggctctaaatagtctaaaagccattggtgtgttttacatgaattctatctcaacatagctcaatttggtcaagatatactcacatctgggccctagaaccatactctccgctgttcttacccccagggtcccagtccctttcactccagaacggaagtcctcttctccatgaccctccctcccctgtgtgcttcctgctgtcaccaccattggaagcagtctcctttatggctgtgtgtgaagctgaagaagggactttgccctctgattatgttagagctaaatcggtaacttctgcaactgagtgtaaactgtctgcagtgtttgcagttgctccactggatgttcatctctctgcctgccctcatgccacagcctcctcccaagcccacagtttttctctctgacttattactgcaagcactactaccgagccggccctgatctgctcacgccattgtctctgcctgcactgtgttcctgagagcttagttcagttcttgagatacaggtggtgcttcttatctggatttccaagctacgagatgattgatgtctacctggtgtcccatttttaatctggatctctgatcttgcttttgccattgtctttaagttactcttggttgactatctggatatggcaccaagttcagggccaccctgaactctccaaccgtttagggctggttgttcttagagttgcagacagatggtcagttctagactctgattgttggagtgcaggtgtgtttagctgcagcagttgcccaggctggcaagaggggaagggaatgctaatatccataccatagctctccagatcttgttggcttgtgaaatactgtagagatggaggtagtgtttatcttgaagtctgtccaagaactccagggtgagggctagtagacgcttatcagaggcaaacacagagggtggggcctgccccatgctcttacagctaaagaagctctgacctgagccccatgacttctgttatctttgctctgccagtgtctcatgatagcaactggacaaggtctcagggactgagtgtctcagggtcagggaagttcacatttcacgaacagtgcccagtcctgactctgctccacttgtcccaaaccacaagtggcactctcgtcctgaaaaatggtgattgtatcagcatcgaaaacgtcctactgaggtctggcagtaggaaagaacacaatcttgtttattttgaggcacatgccattcatgtgcacagcactgagcacctacctggtgggccccaagagattgagctatagtaactgatgttttgaattgaagttttcctgaaccatgtttccttcagggagagcatgtgtggctatggcgcttaaagactaactcctgttgttgtgcatccagtagtgacctgattttctcagcagttggctttcctgttctaagctaagagactctaatcaagacatagcagagacgagcaaggcactcttctctatgtattgaacatcatggcaaatccagtaggaataaggaactttggacttcatttttttttttttgctgttgtttatttttgagatttgtaatttaatcataacattctctctcttcccttccctccctccaaatattcccatgtacctctcctcactggccttcaaacttgtgtgttctcttttaccatcagttgttattccatgcacacatgtattacacacacacacacacacacacacacacacacacacagatacacacatttctaagtataacccattgagtacatgctaattgtatgcatgttttcagggctaactggtgctggacaaccaattggtgtgggagttccctcagcgtcactccacattgttgaaagtccccttccctcccttcaaagtggaatgaagctacaggaactcccacaaattcccatactagagcaaagaccatgttctgtgcctcctaggaaggtcggacattatgcctatgaagtctcacaacacaaagcctaaacatgtgttcaagaaggatgacacaccaataaacatgctaatgtgctgagggagagcccatgagccccagccctacaggcagctaaggaaagccgaaagtgggagaaatagtcttcccaaagagcatactcactgtctatccaatatcaatggtcagcccaaaaaacacaagtgagtattattatacaggctgagtaggttgtacttacttagttgggaatgtttgtatgtatgtatgtatgtatgtatgcatgtatgtatgcatgtatgtatgcatgtatgtatgtatgtatgtatgcatgtatgcatgtatgtatgcatgtatgtatgcatgtatgtatgcatgtatgtatgtatgcatgtagcaataattaatgaagaagaggccatgaattcgaaaaagagcaaggagtatatggggggctttggagggaataaagggaaggggaagtgatgaaattatatcataatattaaaaaataagagaaataactgaacaaatatttttgtagcagcattcctggagtcccacagctttccctggcctgttaaagtgcctccctgcccctgatgagtaactttggcaaccccttaaagccttcagaagcattctgcttcatcaccatgggaacaccttttctttttatttgaagtctaaaacctgcttactgttgtgtgtatgatgtgtataggcaggtgcgcacacgtggagatcaaaagataactctgtggagtaggctctctccttccacctttctgtggttctgaggatcaaactcaggtcttcaagcttaagccgcaagcgcctttacccactgagccatcttgctggcccatgtacttttttattttttgggttataggacatcaattagcgtaacagctgtatagaaaagcaaaataaggagttgggaacaaatacacagaagagctgttttgttagagcaggaatgcaggctacacgggggcatctacttgtctacaccagtgtgagatggccattgaccctcgtgtttcagaccatgtccctggtaggttgcactgagatggatcttcagaggtttttctgtgtaggctgttgaaggaagactgattgtctttcaataccttaagttcaagttatgtatctacatctgtgttctgatgctgtgtatattgattcgtgtataacctactgtcagccattagcagtgcttgttctcaatcagtgagagaccctagtgaagtgaaaacttaagggctttttaagaaagtcagctgtgttagatagtgttttgttgggacaatcaatcaggtggagaagtgttttcttgaaatggacacaggtgaaaggctaaggcagactcatgaaggaacattttattgaagcagacacaggcaaaaggatgtcctgttaaaataaacaggaaaaaggacaccagataaaggatctttttcgttaatgacatgtatgtattggtctgacctcttttttttttaattttttaaaaaagatttatttattgttatatgtaggtacactgtaactgtctttagacacaccaaaagagggcgtcagatctcattacagatggttgtaagtcaccatgtggttgctgggatttgaactcaggacctatggaagagcaatcaagtgctcttaactgctcaaccatctctccagcccttggtctgacttctattgtgtagttgtgctctatttgttgggactccatagagaaaaccgtgccaaaacacttttggtggtgtgttatagttttgtttgttttttgtcttttttgtggactctggctaattaacagagtgatgtcagctgagacagatatatgtgctgagacaagacacgtgttgagggtatgtgacaagacacgtgttgagggttgtagggactataaatagaacttgatggacaatgactgagacagggctagacttgtttatagagctagctatacagcgcttgttagtctcatgccttcactaatcttaacttccctgagagagacagggccaaaaacatttttctgtcattcctccttggtcccttctattgacttatgtcgaggctgaggcctagttatctttactaggtcatgtcactgctgttgttaacctgactctgacaaactagactattgatatatctataaaatatttataaatagattgagctgtcactactgacctataaactaaactatagatttttgtttgttttttggtttttcgagacagggtttctctgtgtagccctggctgtcctggaactcactctgtagaccagggtggcctcgaactcagaaatccacctgcctctgcctccggagtgctgggattaaagatgtgcaccaccacgcccggccgctaaactatagatttttaaacaacatagatgagagttctcccacccaaaaaaaaatttttttaaaacaggtttatttcccccatagtctttcttttccattacttctagagggtggtggttaaagcatttaaaaaccatcattaaaaataggctttaaaaaattaaaattataccctagtagctttctggctactgaatgaggctttaatgagtggcacatgaaatctagagcagcaggtgtgtgggtctgttgcggccggcccgcagctcacaacgaacggtttaactgagatggcaactcaggctgaaagagaagaactagacgggcggaagaaagaacgaagccaagtcaaaagtcactctgatcaaagctcaatttttactgttgtaacactcagttatgaaggaagggggaggggacccgattttcaccaaataatctcgggctctagtagcagggtgagcacgtgatggctttggaacagcaaggcggcaggtttcagcagtgggcgtggcagaacgaatgaacaggaagctccaccccagagcaagcaggtttcaggctgggggaggggagactacatcccctcccttttgttaacaaaaaataaaaaaaaagaaaaagctgtcctgaggcaaaaaaaatttttttcactgcctcccaccccaaaataaaaagccaattggccttgtactacagagccagtcctcacccccttctccctgtttcccgcctgtcatccaaaaatgtggaaaaatatcaactcagtgttattcttaataaagtgtatttcaaatttgttcagccaaacttagccaaggttccaacgccctacttaaaattcaactaaaaagttacctattcagtactaattaacattataaagtcagagcctacagctccaggcttttctgttagttgcttactaagataaaaaggacagtcttagccagatacagtttaccattaaaaaagttagaaaatcccacaaagacaggttttttctttagccctaaaattgaggcaaaacaaataaacaaaaagctccaccccaaaacaaacaggtttcaggctaaaagaaaaaagactacatgggtcaagatagttgtgccagagttagacatcccaggcatccttttaaatagcatgtatctgtctgtctgtctgtgtaaaatagtaaattgttctaaaatcctttgagccaatccctaaaggtcaggagtcactatttataaatgcctttgcccattcaagggaagaatattttgaaacagct

SEQ ID NO: 126 - DNA, 750 bp, Mus musculus
cagacctgatcatagcacaaccctgcacggctgtgttgcagggcccggtagactcactgttccgagatggccgggcagtcagacaaggatgtgaagtactacaccctggaagagattcagaagcacaaagacagcaagagcacctgggtgatcctgcatcataaggtgtacgatctgaccaagtttctcgaagagcatcctggtggagaagaagtcctaagagagcaagctgggggtgatgctaccgagaattttgaggacgtcgggcactctacggatgcacgagaactgtccaaaacatacatcatcggggaactccatccagatgacagatcaaagatagccaagccttcggatactcttatcactactgtggagtctaattccagttggtggaccaactgggtgatcccagccatctcagccctggctgtagctctgatgtatcgcctctacatggcagaagattgacttgtctctccgaagccgaagaactaaaagactgccccagagcggggagaaaagaagccagtgttaatcacttccactgacagaaacctccccctgagaacgtaattgtaatatatctgtttccctttcctcctgtgctagtagaacaaacaagggactctttgtactcttcaacttttcaaatgtgcctttttactcaacttcatggtgatgtttcttcactacataatttacttattgtaaacacgatctttttaaaatatatctggcttgtaaagt

SEQ ID NO: 127 - protein, 135 aa, Mus musculus
THCSEMAGQSDKDVKYYTLEEIQKHKDSKSTWVILHHKVYDLTKFLEEHPGGEEVLREQAGGDATENFEDVGHSTDARELSKTYIIGELHPDDRSKIAKPSDTLITTVESNSSWWTNWVIPAISAVMYRLYMAED

SEQ ID NO: 128 - DNA, 58651 bp, Homo sapiens
aataaaacttccttcataaagcccatcttctataaatcctcttcaacttgtttagaactttcattattttcccaagcccccattcttagtcctatagtttttcttttttgtaaattttggaataactaattatttaatctcaggacaaaaatgtaccacttaagatttttttctcatacaaagttatttttccctaaattcatattttgattaatagacctaaacatatttagtatttttataaaatttaagaagccaagaaagaactttgatgtatttaccaatttggctcaattttggatataacttggtcatttaatgagtattattacttaatacaactttaaaattttaaattgcatagaagtttcatttataaatgttaatttcatttccgattacctaatttattttttagtaattacacctagattacttacgaaaattaaaatattagagcaagtcactattttattttttattaaccaatttcatagcctgttaatatccagtgtttacctaaggtgaaaccttaaagtttaatacatgggtatcctgttcttaacccagaaaatacagctgtttttattaaatcaacaatattaaaccttatcaatcaaagaattgcatacacaaacattattttgttttaggctgggtttatagctttataaccttaagaactctagcagaggcaaatataaaactgaacaataaacccagccaaaaatgttgacaattttgaagacttttctaattttattttatcaacaatttaaaaaccaattaatttatcaaggatttgtttaagtaaggcaaagcaaaaatatttggggttgttacatattttatatgagtacatattttatctaaatagaattccttaagggatttctggcggactacaccaggttttatcatgtagatgcaacacatcacacaatacatgtatatatgcataaatacatctaaacacatacacatacatataaataaagatcttacagattttattttagaattttagtcatgagatattaaaacatacatactggtttcctaaaaagcagttgaattgaaattatttcctcacaaactgggagaaggctaagcttttaacttgttgtttgtagtcctgatatggctgtgaaacaaattttgagcaaagcagtttgaggcagttaccaacatagtggattggacaaagagtaactgtggaaatgtgtctgaattacgtgaggaggggtagaaggtaagagttactctaacaaggtctgtacagtgttttcttgttctcaattatttgtccttgaagataaaaatgctgccattccttatagtatagtgttttacatgagaatttaatctttagcttttaagaaacagcacgaaggtcaaaacaattttattttatatctgctggtttcaagtgtttagctattcaacagaatagcttagctgttttagaaaaagaaagtttaggttacaaaagggtgaagaggaggaattgtaagaaggggaggggaagatccagagaggaaagcctcccagctacctttgagacagtattttgtagttagacagtctttgagtgctgattttttttttttgcctcaaagtatcaattgaaatctaattcttatttgcagtgtatgattttatagctgtggttttttagtttagttttaagaacaatagtctgtttgaatgatctctgtaatgtttaaacatgttaccaggtggagttaaaaaaaaattttgccatgcctctgaactttgagagcccatttgtaactaaatttatctaggtgattaagcacttgccaattagatgcaagtgctaataaacaaaggccaagtaaatgcaagaactgatagaaaataaagtacatatttaccaagaaagatgacagtcttctccaaatgaagaggaaaattccctcatccaaacctcaaagccaagatgagtcagctttggaatcccacttcagataccaagtatgtccaagtcaaatacaatacagaggtgaatctaaaacgttttatttgggaagcaagaactgcaagtccaagcatacacgagtggtctttggtatgtccaacgaacaaagggaaagtttgaggttttataaaaaggagtcacatgtattgttctgaaagttcattagcacttgtaaagttttggggacctggcaagttctgattggtgagtgttggtggtgggtaaaaagtcttatagtagaagcaggttgtttcaatagctattagataaaactggttttaagttaacaataaccagtttctgtgggtggggtttcagacaattacattcttagggtaatatatgatgtttcctgagtgcttttctcccctggcctctcaactttgttttaattgggcatgataagaatgactcaatttatatgatcaactttcacagtggcaatcaggtttggtactattggtgggttcagacatctactggagtcttagaactattccctgaggataaggggggcctactgtgggcacatacattatacaatgccaatttccttgttttgatattgtactatagttataaaaagatgtaaccattgggggaaactggatgaagggtacacagcacctctactatatttgcaacttcttgtgaacctacaattatttcacaattaaagatttgaaatcgtttcaacatatttttgttggttaatgtgaaataaaatatttctatattatatatgaaccatgactgattagtatataatagtacaaataatttaccctcttaacactacttagtacttagaaatatctctgaataacaaaatgttacacttggaaatgtctgcttgatatgaaaaaaatgtgatcattttggaatgcttaaaaaatgtgtgtgtgcattgtcacgtgtgtccgtgtgaagggaccaccaacaggctttgtgtgagcaataaagctttttaattgcaggtgggctaagtccaaaaagagagtcagcaaaggaagttagggctggggcagttttataggatttgggtaggtagtggaaaattacagtcaaagggggttgttctcttgagggcaggggcgggggtcacaaggtgctcagtgggggagcttctgagccagaaggaatttcacaaggtaatgtcatcagttaaggcaggaaccgaccattttcacttcttttgtgattcttcagtagcttcgtgccatctggatgtatatgtgcaggcttgggctcagagtcctgacattcttgtcttcttatattaataagaaaaacaaacagtggtgaagtgttggggtggggaaaattttggggggtggtatggagagataatgggtgatgtttctcagggctgcttcgagcaggattaggggtggcatgggaacctagagtgggagagattaagaggaaggaagattttgtggtaaggggtgatattctggggttgttagaaggagcatttgtcatataggatgattggtgatggcctggatatggttttgtatgaactgagaaactaaacagaagacataaggtccgaataagaaaaggagaaaaacaagtattaaaggactaagaattgggaggacccaggacttcaaattagagagtgcctaagggggttcagcatgattatttgcttggctggtgagtttttggcctctatccttgaatttttttatgttgtcatataccaggccagactgatttaggtaaaaacaacagtcttcatttaaaaatatacagagtcttcctttttcagcagtgagtaagtcaaggcctattcctgtcttcttatattaataataagaaaaaataaaataatagtgaagtgttggtgtcatgaggggaacaggaagctgctcggtcttatttgcaaattgatttttggggtaaggaaaactagtgtacatgttcctgtctcattaacaggtggacacatgcaggtggaggagccacagaggaagaagagaccttgcgtaaggcgaaactggaaatgtaaaatgggtgaaagaagtggagtgtgcttttccagcaaaggccatttatccattccaagagggagttaagagtggcagttaggggataagaccaggaccagctatgatggtttggaggaaaagtataagctggcagtgtagacaagggcagggcatgtatggagaggtgaaaacgaagaataggagtatgactagacagaagagagcagggatgaaaagtttttgggatgcagtctaagtagtgggggtgactgcataaggccctgttgcaaagactctggtaaggaaggatagacctaacaaaatgaagggatgtattaggctcataagggttactactgttcttcagaaatgtgggtgagtttaagggaagtaggggtgagtactcgcgacttccagaaggaagaggagagatcaggctggctgtccaatggacacggctttattctggaacggtgaacccaatggggagggtcctgcaggaggacggcagttagggtattatagatgactaagtagggtccggtccgtcgaggttgtagagtttgaggggtcagattcttaacaagaactgatcgtccagatagggtgtcttcataaggctgggaatctggaataggcaagagaagattagcagcctggcaaatttcctgtctagcctgctggaggactggaagatagtcacctagagggctggtgtctgggacgaggttggggccgagcaagaaagggcatccatataaaagttcaaatgggctgtactctgtagcatctcgaggacaggctctaattctgagaagggaaagtggtaaaagtactatccggtcctttttaaattggaggctgagcttagtgaggtgtgtctttaaaagaccattagtccgttctacctttcctgaagattgaggacgataaggggtatgaagtttccactgaataccaagagcctgagaaactgcttgggtgatttgactaataaaggcccgtccgctattggactgcacagaagtgggaagtccaaaccaaggaattatgtctgacagaagggaagaaatgaccacggtggccttctcagaccctgtgggaaaggcctctacctatctggtgaaagtgtcttcccagaccaagaggtatgttagtttcctgactcggggcatacgagtaaagtcaatttgccagtcctgggcaggggcaaatctccgagcttgatgtgtagggaagggagggggcctcaacaatccctgaggagtagaatagcagatagaacacagagaagcgatttccttgagaatagatttccacgatggaaaggaaatgagaggttctaagaggcgggttagcagcttataacatacatggaagaggttatgaagtgacgacagaatagaatgggcctgtgaggctggaaggagatattttccttggtctaagaaccatttaccttgagtggggagggattgataggtagaaacttcagtgggagagtaagtaggagtgactgatgagaaggagaaaaactggccgtgagggacagaagtaggaatgctagctgcttctttagctaccttatcagcataagcattgccctgagcgacgcgatctgatgccttttgatggcccttgcagtgaatgactccagcttcctttggaagtaaagtggccttgagaagagtttttattaaagaggcattaatgatggaggacccttgtgtagtgaggaaacctctttcagcccatataacagcatggtggtacgggatatggaaggcatatttagagtcagtataaatattgacatgcagtccctttgcaagagtgagggcccaggttaagacaatgagtttggcttgctgagaggtagtggaggggggcagagtggtagcctcagtgatagatgtggaagacactatagcatagcctgcctttgccagtgattggcgattgggcctggaagaactatcatcaataaaccaagcgtggtctgggtggggaacaggaaagaggtaatatggggaaatggggagaatgaatggtttcgttaggatggcaaaaccaggtatctaaaggcaaaagtacctaaccatgcctaggaaggaaaggagttgttttgtagaaggggttggggtttgggagattagctggacatgattagcagggagagcacatgtatttttatgaagaattatgccgagataggtaacggatgaggaagaaatttgggcttgactgaagtaatgggggctgtccctgaagccttgcgccagtacagcccaggtaagttgctgaggctgatgggtgtcagggtcagtctaagtgaaagcgaagagaggctgggatgaaaggtgcaaaggaatagtaaagaaagcatgtttgagatccagaacagaatgggttatggaggggtaaaatgggggaattgtaaggagagtttataggctttataaggccatgctgtaacaagtgagtgataacaggctttaattcttttaaagcgtgctgtgggatgggatattggtgttgagcagggtaagggtgattaggttttaatgggatggtaaggggtgcatgatcagttgccaaggagggagtagagatgtctcatacttgtggattaaggtgaggagatacaaggaaaatatgtgaaggaggctttgaactgggaaaaagggtgacaatgaggtgtggctgtagcctaggaatagtcagggaagcagataatttagttaaaatgcctcgacctaataagggaactgggcaggcgggaataactaaaaaggagcgcataaaagaatactgtcccagttggcaccagaattggggagttttaagaggtttagaagcctggccgtcaatacccacaactgttatggaggcaagggaaagaggcccttgaaaagaaggtaatgtgcagtggatagcctccgtattaagaaggggatggactcatcctccactgtaagagttacctaaagcatctatcatggtccaggaggcttccaaggcgatcgggcagtgtcagtcttcagccactaagccgagaagatctgggaaggagtcagtcagtgagccttgcgccagagttccaggaactctaggaatggctgccaggtgagttggacagtccaatttccagtggggtcctgcacagatgggacattgcttaggaggaatccgggctgcagacattccttggcccagtggccacattttcagtacttgaagcaagatcctggggtaggaggtcttggaagaacgcctggccactgcggtttaggcgttttgaaattcttgtatgctggagatgtggctgaagtttctctcacagcagaggcaagtaattgccactcttctctattattgtacaccttgaaggcaaggttaagtcctgttgtggggtttgagggctggaatccaatttttggagctttttctaacgtcaggagtgggttgggtaataaaatgcatactgagaataagacggccttctggcctctctgggtctagggcggtaaggcgtttaagggttgttgccaaacgggccatgaactgggctggggttttatatttgatgaaaaagagcctaactgttttgggagaggtcggataaagaaaacaggagcaacaaccttgactatgcctttagctccagccacctctttaagaggaaattgttgggcaggtggggtagggctagtcaaggaacaaaaccataagccggactaggtgtgaggaggggaagtgatagaaggattatagagtgggggaacagaggctgcggaagaattgggacctggctcagcccggcgagcaggggagaggtcagatggctccacagaaaaggaggattcaaagtactcagagcttggggtggagaccgaaggaacacacaggagagaaagaagaaagatttgggatgagtcgcattgggagcagagactagggcgggactgatgtgtagaagaatgcctggatgtcaggaacctcagaccatttgcccattttacgacaagaattatctagatcttgtagggtggagaaattgaaagtgccattttctggctatttggaaccactgtcaagtttgtattggggtcaggtggtattgcagaagaaaataaggtgtttaggttttaggtcaggcgagagttgaagaggttttaagttcttgagaacacaggctaagggagaagaaggaggaatggagggtggaaggttgcccatagtgaaggaggcaagcccagagaaaagagagggcagagacacagggggggtcggtacttgacaccaaggtgaaggatcaaggcaggtgtccctgtggtgatcagacacctctgaaatgtgggtgaataatcaggcaggcatccctgcagtgattaaacaccaagggaagactgtcttctcgagtccgtgaccagtgccggagttttgggttcacggataaaacacatctcctctgtctctatcagaaaaggaaaggaactgaaattaagggaagggatagattgaagggtggtgccaaaattgaaaggagaaagaggttgagagatagtgagagaggttggagaagagagtaaaaagaagctgcttacccaatttaaaattggtgagatgttcctggagctggttggtctgaggacccgaggttgtaggtggatctttctcacagagcaaagagcaggaggacaggtgactgtcttatcagttaaggcaggaaccggccattttcacttcttttgtgattcttcagttgcttcagcattttcacttcttttgtgattcttcagttgcttcaggccatctggatgtatatgtgcaggcttgggctcagaggcctgacatgcgtgtgttttgtgtttttctggataggcatgcattcctatggaggaggtaagcagggggaagggagctcacattcatcagacacctagtatgtgtaggaaccttctgcatccctggaaggatggatgaccccacatgtgaaacctctcgtgtggttctttttggaattaactaccattgctgaaaagggcctacataaaatatcaaattttaacatgctggaatttttctttattttttttctccttcaaacatttgtagctctttatatgtggtatttcctctgtgtcagaagggaaagagggtgccctttggggaagttctcttccagactcctagaagagaatctgatttaccttaaatgcacaaacaaggccttgccatgtcactggccaaccgcagacaaactacttcagtcacagaaataatttggacacttttgctttttaaggaaaagatgatttccctggatttttttcctgtgaggacgaggcattccaaaaccccagcggggtcaggcacagttcgccaactttatgttttggggggcagcgcatttgcttcccgaagtgagttgcgaaaccgttttctagcgcgcacggggctttcatctcttccgtgcatgcgaacggctttccgagatgccccctttatgggcttggccatcgctacttttgttacaaattaacgtctgggactcggactgctgccaataggaaactcccgcgattcgctgcctagttcgccgccctcacaagactggactctgcacaggccatccatgcccgctggtgcacctcgctctcttgcacgcttaacccgcggggacgcccccgacctcccacctcagccctcgccacagttagtcccgcccttccgcgcagactccgtggagtcctgtcacgctctccgcgcgctgcggcagccgggagattgtgaagggcacctccggcagccaattaacacccgcatactgggcgggaccacgcttgggcaggcggagggggtcgaccgaaggcggggacttttgagtgacaaggatgatggccaaccgtcggaggcccttctactgcgccccgcccctgagccggccgcccagcccccagtggggttcccggcgcggggaatgtcccgggtggagctggctgagtcgcgcgctctgctccacccgacggggctgtgtgtgctgggcctggctcgcggcgaaccgagatggcagagcagtcggacgaggccgtgaagtactacaccctagaggagattcagaagcacaaccacagcaagagcacctggctgatcctgcaccacaaggtgtacgatttgaccaaatttctggaagaggtgagttggggatgagcggcttggggcgcagggagcgtgggccgggtttgggggttcactggcatgacctgtctttcgcggcccggagtccgcatacctacgcctaggcgcgccccccgagttcgctcacctgcgcgtgtacgcctgggcgcgcttccgagtccgcacacctgcgcgtgcaagcctgggcgccccccaccgccccaagtccgcacacctgcgcgctcacacctgggagcgctccccgagtccgcacacctgctagtgtacacctgggcgctctcctcgagtccgcacacctgcgcgtgcacacctgggagcgctccctgagtccgcacacctgcgcgtgtacacctgggagcgctccccgaatccgtacacctgcgcgtgcacacctgggagcgccctgcgcggcggcatcctcgctaggtggtgctggagcagccttccggggatagcgcgcagccatgcgggggatttaaatgatccctttctcccttgagtttgaatagaagggtgtccttccaggaccggcggcattcccgcagtggccggctggagaccacccaccccgagagctgcggatcccgccggaggggaccccaagtgcggaggtcgggtgtggtccgggcctgcgcttcccgcggcagccactggccgaccttgcggtccacacccactcgcgttcgcgttcacctggaagaggctcggtgttaattaaccttttccagtcacgccttggcagccaggtgccgtgcttgactcctgagaccgcggtgtgtggctggagcaagaacacagaggccaggcagagcagcggacgttctgcgtgggactcgcccctaacagctttggaaggtgtaataggaaacgttggttaacttgaagacattcctttgataagattctttgcattcggttataatttttgccgcacacgctaaggggcgcttttggtgattgtcttagatcctctggaagtgttttactacttttgggggagtctcaatcataaatcttaacgcatgctcacgccccctcccaataatgagaaggtttagtgatgggaattttttacatagtcggggagcaggggacaaaaatagatgcctggtctgagctggatcacagtttatatcagaggactttgtttttgcagaaaatgttaaaatcaaaaggcctgttttaaaaaatgaggctgggccaagcacggtggctcacacatgtaatcccagcactttgggaggctgaggcgggtggatcacttgagtctaggagttcgagaccagcttgaccaacatggcgaaaccccatctctaaccaaaataccaaaattagccaggcctggcggggcacgcctgtagtcccagctactcgggaggctgagacaggagaatcccttaaacctgggaggcagaggttgcagtgagccgaaatcgcaccactttgctccagcctgggggacagagtgagactctgtctctaaataaataaataaaattaaataataaggctggagttgatgtttattggtaaggtatttcactctggagcagtgcccgaagataaagtcatgttaccatttagtaaggaggggtttatgttgggaaatcagagctgacctgtcctctccctcctgcccggctgcagatcttgtcatataacatcaattctcattaactctaaatgtggaattttaagatacagtgtgtgctttgtctatttgtgcttatagaagaagtagcataagagaatattaggatattttatattatgaagcattttcttcttttcttgtcttctcctaaagcgagttttttcaaccctggcactgttgacattttgggccagccgatctttgttgtggcgtctgtcctgggcattgtaggatattgagccacctccctgagttctacccactagatgaccggtaccaccacctcccctatttttttttttttttttttttgagacagagttttgctcttgtggcccaggctggagtgcaatggtgtgatctcgactcactgcaacctctgcctcctgggttcaaccaattctcctgcctcagcctcccaagtagctgggattacaggcgcacaccatcacgcccagctaatttttgtatttttaatagagacagggtttcaacatgttggccaagttggtctcgaactgctgatctcaggtgatccacccaccttagcctcccaaagtgctgggattacaggcgtgagccactgctcccagccctacctcccctatttatagcaacccaaaatgtctccagatattgccagaggtcccctagggcacataatctctccaacttgagaattactaaggttactgtgcatgactttaggggtagattttcagagacgataatagggaagtgaagattattgttaaaatgtactcaaaactatttactttcacatttcattcctgtgagtcaggaaaggagggattgtgcaaaaaattttccgagaaaaactgagagatgagagcaagctcttgagtgggtaaattagctgaaaacaaatttctttattttttcttactcaaagtttttgtggagaatgcatctcaaataaaatgaacaagagggtggctgacccctggaacggctaggaggatggcgtgagtgaggaggctggggtctgggagaaacacaaggagttagtttggttttggtcctgttgactttaagaggttggagggatcttcaggcattgcgagaactgcatgcgtttctgcctccactgtctgccaacatgtggttctgggaacaagcaaggccacttagcctttcactggattgtgtctgacctctgggcacctcccgattcgacctcttatggacgtgtttttccatttgccgtctttattatttgctttgactttctgtgaccatctcttgcttattgcatgtcctggtcattggcttcccagcccccggcaaagcctctgggagcctctctctgggttctatctgagactctagccaggattccttgcaggtgacttcctgtgctcctggggttatatctccaataagctcactcgctcagagctcttcagcacactgccctgccaggtagtttgttatgaggctagtctgtttgtctgaaacgtacttttaaaacagaaatgagtgcagaatgtctctgtctctcttccccgcttgcccgatcctctttcctgtcttctattgttgaaaggctccagaatttcatgaagcctttgtgtgttaactaacaaatattttatctcacctaatttacctaaataggaaagatttatcttctccttctaactctcaaatgaactttcagtcattatgggctagacctttgtttactgtgagatcccccatccgtatggacaggatttctcatggctgagtatttccccttctttcagaatgtcctagatttatgtgcatgtccgtgttcatgttgagaaggtgtgtggtgagatggtggagggatcctgctctgctggcaggtacaagccaagaacacaggttgaagctcacaggtgcagcatgtgctccgacctcctgaaataatggccactaaagctgtttttgttgtttaggcggaggggtagaaacctaagagggaagactggcttattattaatggcagtcgacatagcagcaggtgcttagttactgtctgatacttaaaagattttgagctttattgcctacatattttgaactagatttttttttcaatcctgagttctagtttttgagtttatatttgtgaaattgagtctttgcttgatcatagaactttaagggacagttatttgaaatgaaaacttaggcatttaggaccagggggagaaatgtttgcatttccctttctgtgatttgggcagcagcatctattcagtttttaaaagagctgtggaggggagagagaaaggtatcctgtaattaacaacacttccattagctgttgcttttggttcaagtcagtgggtgtttgattcgtgaaatagatactgtcctggaaaattttataaagcagaatgtctttttgtgaagttgtctcctctccctttacatcataaaaatggaaacttgcttctgtagaacattttctagtgttcctgggattctgatagtcttggacctgagccttaaatgttctttacagcattctgcctcatagaagctattggctcctgactcactttgatttttggagtcttaaaagtgtcctttctagcaggttttattgtagggacttgctctttgttattttccattgaacatggctgcctatgttgcgtagaccagtggttctaaggcttgggaatcgaggaagagagtatgggtgctgaaattcattgcccttaattttgaaaaacatagaacacgtatctttacccttgttaaagctaccatatttagggctaaaatactaaatgcctttgctttttgcaagaaaatttgatagtattctgaatctcatgctactaaaggctgcagttggcaaatatgcctttgatgcatgtaaaatgggaacattattattatttaatatataccgttaggtaaataaaacttagaaattacagagtctgtagaagggaaatataaagttattgttggtagtgttggtggcttaggcatcttgggtaaagtggtagtaaaaccacatcttagaaggccacctggggaatgtgaacccgtgaggcttttgtatatttctatatatatctctatattttttggtaacctgttgctacttttgaaaagaggttccaagaggcaactttgttttgaaacagtaaagaaaacagtaaagaaacagcaaattaacttttgctttttgattatcttaaaggttgatgaaaattgtaaataaggaagggaaaacacatgcaagccggctttggtcaatcaaggaataaataacatgcacaattttactgaatgtgaatgtctggtattctgaaaagtcctcctggtgaagatggctgataagtgcctttgtagttgagtggagtctgaacaaccctgtcccgctgggcattcatgggaaagcactgggctggggttaggaaaactagacctggtcttagacatatcatggaggtgaccttgggcaagtcaggtatttctttcagtcactttccttgttctgaagtgggaactattctgtcactgccatctgcattgggagaaatgatatatgtgagaacactggaaaaaatatgtagagaaggcatttaagtgactatattttgattgaattaaaattttaaaataaattgtttttatgtggaaggtccatttagtaggaacatatctcaggaattatagtgttaactagtaaacaaaatgactcaaaatacaaatattcacatgaaatataattgttcaggaatgtgtgctttgcaagattggaaatcatcccatttcaggagcttttaaacatacaactttattgtgtaaggggaaaataatacatgatcatgttaaggaagtggacagtgtggaaaactgcaaagaagaaactcaaagctgcctggagctctgctccccgaaggtggccagcttgagcagtttgcacactcactactacaacaccttgctcgtggatgtgctttacatccatggaaatgtgctctgcatgctgctctgtaatctccctttttccccactaaactaggtgttgagggaccagtcctgaatttcagtaactcctgttcccaggctgcctccttattgtatagagggatcctaatatacggaatcctctttccttccatgtttttaggttcccacctgcaattacctccttatggtagatctttgtaagtgggattcttgggtgaaaggatgtacacttctacttttttttttttttttttttttgagatggggtcttgctgtgttgcccaggccgtggtgtgatctcagctcactgcagccttgacctcctgggctcaaccagtcctccctctggaatagctgggaccacaggcatgagccaccatgcccagctaatttttgtattttttgtagaaatgtagtctcttgttgcccaggctggtctcgaactcctaggctcaagtgatctgccccctttggcctcccagagtgctgggattacaggcatgagccactctaaattttgatggatgttaccagagcaccctggggtggcacaccagtgtgtgcatttctcggttcttaggagtggaggaacttggttgcgcctcattcacctcccttcctgaatttggctgtgtacttctgttaaaaagggaaatgtatggaataattttttatcccctttagcttataaattctcttaaaagtgaagctgtggcaagtaataccttgtctattctatgaaagaatttcattgtctgaaggctcaaagcatcagaaaagtgaccggaggcagcagctgactacatgggaaactgagtagcaggctcagagccatttctggagtctcaagagtgtcctttctagcaggttttgttgtagggacttgctctttgttattttcctttgaacatggctgcctacattgcatagaccagtgctttccaaggcttggggatagaggaacagagtatgggtgttgaaattcattgcccttaattctgaaaaacagaacattttaatcaagtgtgcttcctttcctattacccttggacctagttttcttgggaacatagtcttgagtgtatatagtaactgggtatctgtgccttttactgagttccaacatggggaccgggagggtgagctgaagattgggtggggacagctccgttcttgctgttgaatagaatctggcctgtgctgcctgttggcttagagctgacggctctgtggatgatggcaagaagttactttcttacatccgtagaattctgtctctagcaggcccatgccaaaatgatggcatctgaaccagcactgacgctggggaggctctggagggggcgagggataagggatgtggacctaagggaagggatggggtgattaacagcctctaggctcagttaagggtcctctctgcctggctggtgggcacgggagcctgtctgaaatggaatcacttgaactcttctgtagttgagggcctggggagtgtcagtttgcagcttgtttctttcactgcctgctattgtttgttcttggcagacctattcattaagctttgtgcagctgtgtccagaattagccaggtcacaaaatatatccagacttctttccctcgtcttcctcagaaagtgttaattaagtaaatgccattcattaatcgtccccaagtaaatgctattctttaatcctcccctccccaacaatccctagtgagctaataagaaaagtgatagcagtggacgttggctgaatgtttatggacattcagtatgtgctagggagtgtgccaagtgctttttgcacataaaaccttctttgcgtttgtgcttttaatctctcttttttttttttttttttttggagatggagtttcactgttgttgcccaggctggagtgcaatggtgcaatctcggctcactgcaaccttccacctcccaagttcaagcgattctcttgcctcagcctcccaagtagctgggattacaggcatgcaccaccaggctgactaattttgtattttcattagagatgaggtttcaccatgttggtcaggttggtctcaaacccctgacctcaagtgatccactcgcctcggcctcccaaagtgctaagattacaggtgtgagccactgcgcccggcctgtgcttttaatcttcaaaacaaccctatggggtcagtggtgattgtgtcctcccttttaaaggtaagacggtatgtcttagggagattttgcagcttgctcagcaagtcccacagacgataaggagcaaagccagggcttcagtccaggctgcgggcgctgcgacccagtgtcttcagtgctgagtctgttgctgaggcttgagatccaaggagtattgatgagaacctagcgtagctttaaaagcaaaagtgcatcccactgatacagagttgctgtcatttgctggagaccttgatcactggagagttctctggaggaaccagggagaaagcaaagggaatttgtgatgcaaatatctgaacaaagccaaaacccttggaaagttaatggacaaaaatatgcctttctttccatctgttgtcagtttactatgttgccttctaggaggtgaaggaaacagccattcctgtttcttgtagaggaatttttaaatagagggagtcggggtggagtcttcacggcctcagtttgtttgtgacccagatgctgctctcacctggcaggggctgaatcatcggtgtggttttggttcggaaagagattgtttgcacgtgtagtgggtatgtgtgaggaggcatgtgttgtttggtgaaaggcatcttaaatgactgccctgggaaggattgtttaaatggaaatccgaggaggttcctgctctgataaatccctcagtgggtcccgctcatctctcgccctccccttccgggtccatatcccctctgcatgtgccacgaggttggttgcagggtggttagaatatctttctcctccaagctgagagcagatgccctggtgtggcctctcttgtatctttgccacctctcatggtggccactgggcagtcagttctcaggatttcattggttccatcaaatgggtggtggttttatgagttttcagcttgagtaataaatgctatttatggcattgaaaagtgtgatttctaggagaagcacacaaaaaaaacttgatcttttggaaacagattgtcctttttctgttcagttcctttcaatggcttcctgttgcatttagaataaaattgtatctctttgccctggtttggaaagctctgaatgatctggtccttacctacctcccccacctcagcaaataacactgtgtcctccctgctaatgcccacacctgatcacattgaccctttctctttgtttctcaaacaagccaaacttgtttttaccttgaaacctttgccctggtttcccctgtgtcaggcttggccctgttcaggtctcagcatggtgtcccatcccgttttgtgcctctgctagcagttagaccctcccggctgtgatatgctgctttttccacgcgatgagggctcctgcctgcccgcctgctgtgcacctggcccatgtccggtgccaggaagtcactcttccggggatggaagaggagagcctggtggaggaacagatacgagcccctgctctgtgactatcttatttttttccccctttttccatacacagtgcatactagtgtgatcccttcttactctgtggcccttgtccggtgccagaaagtaacttcccaggatggaagaggagagcctggtggagaaacagacacaagtccctgctctgtgactatcttattttaccccctttttccacacacggcacatgctagtgtgatctcttcttactctgtaggccttggcctgggattttgtccctgaggattgcacagttagaaactagtgggactgtattgtgaaagtctggattgtgacatagtctcagagcatggaacacaagaatggcatcgagggaggctcccaggcagtcagtagaagggaagaggagaattaaaggtgaggggagcactttggtctgcattttccagtctcttcctgcccagagcccgggcctccacctgtgcctgagatcctgttccccttcccactcacagacattccctaagccacccgatgttccccagtataaaccaggcccctccaggccacaccctgctgggttattctcatcagtgttcctgctgttttctcctttcctgcaaaacacacacacacacacacacaccctcctctcctgcaaaaacacacatattcccttctcccctgaaacacacacatacacacacacacacacacacacacagcctcccttgactcttctgccccctccaggatttcctcatttttctgctcccctgaatagtagaagcctctgaaagggttgttaagcctggtctccaatccacctcctccattcccttttaaaccacacctgttcaccacagcttctcttgccaaggtctcccagggtgccttgtgtcagctctcagttctccaacacagtggctcagcagactctgacatagatgctcaccctcctgggttgccatcctctcctggttccctcctccctccacctcctgtctccttttcccacttctcttctgtccgacctccttattggagggcccccctggggcctgggcttttccgctttggcaggctcacacagtagcatggctttaatgtgctaatgaatcctggattgtcacatcctggccagaaagacctctgtcctgaactggctcttgtatccctgaggctacatcacagttagatgtccagtaggcttctcaccctaacgtgggaaacacacctgctccctctgcatgtccccatctcagcagatggcagttccattctcccagctgctcaggccaaaagcctgggggttgtgctcctctcttctcttgctctcatacccacatccagtccaccaggacattctgtgggcctaactttcataatgtcagaatctcaccaattttttaccatgtctactgctgctcccctggttggagcctccatcttctctcgcgtggtcccctcctgcccccgacagcatattctcaccataatagagtgacattttaaagtcagatggggtcagtccgtatactctgtttaaacccttcaagggctgattacactgccccattttaagacttaggatatggctgcagttgtcaggaaagtgtagttctggcagagggacacatacgtatgtccatgtagcagaatagagaggccagagatagactcgcacaaagatttccacctcattgttgacagagatggaaaagcaagtcgatagaggaaggatagccttttcagcacataattctggaacaactggacatcaataaccaaaaacataaaccttgactgaaacctcacaccttatgccaattaactcagaatggatcatagatctaaatataaaatgtaaaactttttttttttttttttgagacagggtcttactctgtcactcaggctggagtgcaatggcatgatcacggttcactgcagcctccaccacctggactcaggtgattctccaacctcagcctcccaagtagcgaggactacaggtgtgcaccaccatgcctggctaatttccctttttttttttttttgtagagacagggttttgccgtgttgcccagctgccagctggtctcaaacttctgaggctcaagtggtctacctgccttggcctcccaaagtgccaggattacaggcatgagccactgcacctggccgacatgtgaaactttttaaggtgacttaggattaggcaaagaattcttagatgtagtagaaatgtgatccattttcaattctttgcactggaaggttattccccccaaataacatatggttccctgcctcacctcctttgagtactcactcactatcacctcaacactatcacctgaccaccgtatttaagcctggatattaccccagccccctgcactgctgagcccagttatgctgctgagtttttccctgtagcatgtattaccttgtaacatacggtataatgtactcatttattagtttttgcttctctgtgtccttccactagaaatgtatgctctgtgaatgcaggactttttctcttttattcactgataaatccagtttttagaacaatgctggcacatagaaaggactaaatagttatttattgattgaataagaattaaaagtttataaatataaaatactagaaagctgatgtggaatggctgctgggtgacattgaataattttctgataccttattttatttctcctttgtctcacctgcatatttcaacccagtttattatgattaaacatgaaagagaggcctagttatttggcattgagaggaaaaaaaacaaaagagagagatgggcacatgccactgtcaatcctgctttctttccacctctgggctgagcgtaggctattctattatctcttttgttttttatttatttttatttattatttatttatttttgagacggagtctcactctgtcgcccaggctggagtgcagtggcacgatctcaactcactgcaacttctgcctcccgggttcaagcagttctccctgcctcagcttcctgagtagctgggattacaggtggctgacaccatgcctggctaatttttgtattttttagtagagacagagttttgccttgttggccaggctgatctcaaactcctgacctcaggtgatccgcctgccttggcctcccagagtgctggggttataggcgtgagccaccgcgcccggccttgtctcatcttttggccattccagcttaagatagatcgtagttagagtaacagcctctcttaggtcatcactcatctaccactgggcccccagttttggtggcttgcatattcctctgaggacatcgggttgcattgggttacaaagcaggaggtaagctgtggcagctctgggcctggcaggactggtgccacagtgccctcctgctcttgtccctcagaagcaggcctgtccctggtccttccctgtaccccaaggtcatcatgtcagaattggtggcttatgtactcttcagagattagaggaagaattagcacacctgctttattttatccaatgagacaagtgtagtaatggtagaagttgaaatactggtcagggcatagtgaccaaaatttggttaccagtacgttttagaccaaacatttactaattcagttctaaaagtaattaagaagaattttgtttctctttttcaagaagaggaaattctaacagcattctgcaggatgattgccagctcacaggctgtgcataagacctgtctgcccttggcctaactaacctttaagaaccatctcatgtagaaatgtctattatttttatcataggatgtttctgtgaatgtgtgccatttggttctgtgattcaggagaatccagccagttgattaaatccagagataacttttgaagatgaaggagaggtggtgagaagggggtcccttgggtttggtgctggaattggccttcagcaatttacaaaggccaggaactgtgccagggactatacatagtctctgtggcaatataaaatggggatgaggaagaaggaaaagtgaactgatctttctcgaacatctcttacttgccacggagtctgctaattaattcacttaatcctgcagatgggtagctgccagatagactgtgcctgagggactcaggaatcatctggacttagacccctgttagcagatctcagcgaagtggctctcctctcagtacacacagtggtcaggagacttggcgtggagtcaggcggcctgcgttcattccccagggcctcccctaactggctccgtcacctctgtctgtaaagtggggatagtaatggtaatgcctgcctcttgggcttatgagctttagaagggtccacacaagtgctcagaatacttccctatacacagtgagcatttattagatgttacccactgatattcatcattatttgtccctagactttttccctggctgctagagtggaaaggagagaaattgaaggcatttgttcaggctgtgaaatgcagagatcttcggcagaaactccaggtgctctcttccagtctgggctttctgggttaatttctcactggagacccaagccctcacctgagccatataaagttacccctgtatcctccatgacaccgttgtgttctgcctcagggcctctatgtgtctgtgtcccgggcttgggatgcctccccttgctcacctggcgagctcctgctgaaatgttcacacagagtctaagcgttgcctcctgagtgacccctcctgggccttttctctgcctcacactcctgggagagttaatccctccatcttttgtgccatgactcctgcacctgatgctcgccacatttagctatctgtttacatgtcagtttccttactagactctaacttcttgagggtggggccatgactttgccattttggtagcaacagagcatggcttggcattcatcagatgtttgaatgagtttgtgggtcccataggcaagctgggtgactgccagaggggcctctttagtttcatgccatgaccttctaggtgaaatgggaagtaattccatcaaggcttatggggatacagtgagagggtggatatgaagccccgagttggtgccccatgcagatgctggcccctccacagagtccagaatggagcaggacagaagtctgatgaactcaaaccaactttgaggccatcaccctttcccgtcttagaaaaacagcatccagaaatgataggaaatgtttggtcagggcatcttgttatcttattctaaatcttgcatcaattgttcattctccaaactcttttgaattgttttcattttgggcttaactattgcagataagctctttaaattaaaggttgtttttgcctacttgttgtttatggacaatctctgtactccaccttttttggtatgttaagcatttggaatgaaagatcctgtttaaaactccagaatggatggacttcagtcacttagcattgcatttaggtgaaaagggttttttgttatggttgtctttctcgaacttctcttacttgccaaggagtctactaattaattatatgacttaatcctgcagatgggtagctgccaaacagactgtgcctgagggacacgggaatcatctcgacttagacgcctgttaaagtggctctcctcttagtacatacagtggttaggagacctggtgtggagtcaggcggcctgcgttcattcccctgggttcggttcatttttgcttggttaagcaaaccctccgaaggcatgactttgacctgctgcagattgtcatattgtagtgtcgttttgcatacgcttttgactgtttaatagtgacaaccttgtagtcaagtggaaccctgacagaagggtgtgtgtgtgtgtgtgtgtgtgtgtgtgtgtgtgctgaatcttttgtacttcgtaagacccagaaaggcagggcagatgacaaaatttcttgaggtttagaagtctgtgaagttttctcccaaattctcaaaagggaaatttatgaagaaactttatttttaagacatctttttatatttaaagatactttgttcagaaatgtaaaaatggtcactttatttgcatgttcagaaaaaaaggtggggggaactgaactctcaaagtcagaaagcagggttcccgtcccacctccctcgtgagctatcagtgtggcactgggcttcattcctctgcgtcccattttctctgtctgaaaatttaggatgttgagtctctgaaggtcctttgcacctctaagcctctgggatttttcaccttcaccctaccgtttggagtcaagatctccaggtcagttgcctggttttgatgccaggctcacagaggaggtggaggatagtgggctgtgcaggaagctgagggagttaagtattaaggctggagcttgtgttgggtcgagggggagaaatggggttggagacgcctctgggctgggtcagatcccggtgccgcgctggtgttggggtatctggtctgcgcaccgccgggtcctccctggccaccctactgtgtggcgacggctcctccagcatgttcttcaagcctctccttttcagcttcttcatctttatttatctgctctattgatccacatcctaactattctaaaggggctgaggttattttttaatagctcccgcttttccagactctgctgtgttcaggcaacaattcggatgccccttcatgttcctcttgttgcttgctgcatgtcaaaccctgattggtaggaagcttctcgaggctcggactgtgtattcgtgagtttcagatgcttctgcatgtttacacaggtcacttttcttgactaaatgattgatgtagtaattaggattaggctcaggagatcctctaataactggcttaagcgggacaggagtttatttgccctaaagaagtgatctttgccaccagagctgtgtgataactgcatcccgctcccttctcggcctgtcctggggacagcctcatcctggtgctcggaggcggtatctcaactccaggcagcaggatgaaggaagacagggcacagaggatccaccactccagaaggaagacttctggaagattcttccattccatgagccagagtttaaccacatgagatatgtagctgcaaggaggctgggaagtatctgtaacatctttctttgttggccattcccagctcagagttttaagtattagggaggaaaggagaaacagacattggagcaatgaacaattccacccccgtccccctcacctgatttgttcagcgaagggtacctcctgtgctgcacaggtgttgacgctctcttcgagaagttccagaggcatttgatttagctgcagaaattctccaccgtaggtttttgaggagggtacaagaaatggtcaaaacagtacttgaggatgagatcccagcagcaatatatgcaagggacaaaagtggggtaaggattggagtgaggaagaccagctggcggctgcagccagaggccctccctggtttcctttacaggaacggaagcctctgctgtcaattgagccagactattaacctttgactttgagattttataacttgtttctgcaaggccactaaaatgtagcaaatttaggagttaagggcaacgttagacaaaaatattattctgtatcaagcttaagacaatctcatttgacctagttatttgaagaatatagctggcaaagacaattccaaaaatatagtgtatacccatttttactttctgggtagagtatctaaggaactataaaatggccctagaaacaacaggaatgaagaatgggcctggtaattgttttcacccagtgaccagcttctgaataagtaacagttatagactgcaaatttaaacctagagtgactgattttacccacagcattttctttctccttacgattattgccttcacactaagaatttattatttattgaaatcatctgtatcaagtagcatcaaatttattttatcttgccagtttttatagatccacttttagtgtacactcttaagtagaaaatagaattttcttgcagttttaaaaatcctttatactgtggaatctctaataatacatttatttagcatttctctttggcctcattctaaaaagaagtggaaacatcgctcgttgtgtatattttctcatttttggcctcaacatacaaacccatcccaagatcatgtctttattgattgtacttattttacagctgactgtgacatattcgcactattgtgctattataaatcaccttctgctattttactctgctattcattttttcttgtatgggaaagtggactccttattttcatttcagccacgtgtgcactctctcgctgttacttattactgaagtagggagcatttgggaactggagaatggcgtgcaaatgaagaaggccttctagggattggctgtgccatgtgaacagtcctgggcgtgccatccatggagcatgccaatattgcccagaagttttgggtcagcttcttttttgtgtgaccttggtggaaaccactgagctccatggtattaagtgggccacgtgtcttctcagcgaggttcttacgtaggtatgaaggaaggaagcctgttgtgatccccgggggagctgtgagtgtagagctggctctgaaagccttggcatctctcctgcaggaagaatcccaggagcaggtgaatcccacctgcattgagcattttttcagtttaaagcaaatccttactgctagagtatatttagaaagaggcagggccagggccgtggctaggccagcttcgtaggtgatgagctctgtgttggccatcagccttaagtgtgttgatttttcacagcaggtcactcagcagtgtttatctgaaaatactggcttggtgctattaattaaggatgaaatgaaaagcttgtttctgtgttagcattgtctaaaggactgtaaatagtgcttaattcattatggatatttggtgcccagtgaagaataatttaccaagtttgtaagaacagtattttcttcctttttaaactcttttatttcttaggaaaccagggctgtacctcttagatcattgaatagtgcagaggtgcaggaagtgccgtttattgggatgactggtgttgggcagaggggtgaccttaccctccagtcagtcactcagcacacaggggcttcttcccttgactgtcttcctagcaaagatgacctcgtctttccttgaagatattgataccattcagctaacacttcattttctgccatatttgtgttcctttcatttttgtgtgtacgtatttggtggaccgttgaccttgataaatcctcagctttacaagtacaattacaactgtgtttctcacattacatgaagtgtaactgaaaaggttcagacaacagatttttaatgatagtaaaaacaaggactaaagccataaaacactcttgttttgttttgttttgtttttgcaatggagtctcgcttttgtcgcccaggctggagtgcagtggcgtgatctcagctcactgcaacctctgcctcccgggttcaagcaattctcctgcctcagcctcccaagtagctgaggatacaggcgcccaccactacacctggctaatatttttgtatttttagtagagacgggggtttcaccatgttggccaggctggtcttgaactcctgacctcaggtgatctgcccacctcggcctcccaaagtactgggattacaggcgtgaggcactgtgcccggccgccataaaactcttaatttatattaaattagtgtaaataagagaaactctgcttgcaagtgttctttgccttgtcattatccagacaggaacttcttcactttacctcttgttagaaataccagaattgttagaaatagataattggtaccacgaggaaccgtcagcgtggagacaaaagatctctcagcaaagcaatctttactttctgcagaaagggtgctcaatggcagatggaacaatgacgagagcacacctgaacaaaggaaaagcagacatatttatcccttacacatttgggtcgtccttactgctgtgtcctgcatccattggctggagcaggaccacacactcttaaactgatacccagtttgctaatcgcctaaaactttcctaaataggtaagtgcaaagaagaacaaaaaagttgcttaggaaaggtttaaggaagcaataacaattccaaatgagaaaggggcataggctgtgagctggaacgtgtctgtgagcatgtccaacagttacataggatagggcttagcaaagagttattagcacaaagcaaggaggcttgaagaaagttagtctttaaaataatcttttatttctaacacttatgatttattctttaacaagaaggggagctttaaagaggaaactttttactttctacatctctttatgccttagggttggcaagatggtgaaacaggtcaggcttgatcctaaaacctgccacagagtcataggagactcatttggtccttggccatcttcagcttttatgttggcctctccttgcatgagtcagttgacagtagcgtattatgccagagtagttttgtttgtggcaaactcttgttctggagatagtttgcacacaaggtaactacagttaatgttaatgtattgtgtagttgaagattgctgggaaaatacatcttaagtgatctcaccgcacacacagacacacacacacacacacacacacgataagtacatgaggtgatggatatggtgattagcttgattgaatcatttcacaatgtatatgtgtatcaaagcatcacactggattccttacagataaacaatttttatttcttaagtataccttgataaatctggggaacatttttaaaaattaaaaaagataaggtgagaatcatcaaactgcactgtgggatgagggctggagagtcagagaggtacccgtggtagctatggggctcgttcattcctgccctcagggaaagtcactcaaatccacacttcagtgatatctcagctgctgtgagtttaggacccattgggtcatctgtagacagtcagaactacgaggctgtctcagggaaggccagaagtctcttctgtgctatttctttatccccaaatgaactgtatgcttcttcaagattggatcacattgatttctcatgtacttttttctgtcccacacaatgccttgcacatagtagacagtaaaatattttgatgaactgaatcagacagcagttaagtacaaaatcatgtgatctgaatgggaagaactgttagagctccggaaaagtagagtgctatgaactggaggagttggaatgagagggaaagttcccatcagccactgaactggttatatataatagttacaaaaccaatgtgtaagaatgatctgtgcttatctcatttatttatctaatgaatacttatgggtattgaactaagagttagagaaacagtgatgaacgagacagatccatgaatcttagaaacaaattgatatgaaatgtcgctgtcactaggtgtgctccagggagtcctctaggacctccctcgataccaaaccccgaaggtgctcaagtccctgatgtagaaggatgtagtatttgcatataacctatatgcatcctcctgaatattttaaatctagattacttataatacctaatgtaaatgttagataagcagttatactgtatagtttagaaaatattgacaagaaaagaagcctgctcatgttcagtacagaagcagttttttttcctggatattttccatccatggttggttgaatctatgggtaaggaacccatggatatgagagctgacaataattgtaggtagtgacaagtactgagagggaaatacagcagtaaaggataaaggcaatagtgtggggacacaggcagcctgctttcattaattatttaacttaatgaatgatggggtcttgctctgttgcctaggctggagtgcactgatgcagtcatagctcactgcgacattgaacttcttgcctcaagcaatccgcccacattggtctcccaaagtgttgggattacaggcgtcagccaccacacccaggcaggctgctttagatggggaaatcaggggagggctctgaggtgttaacgtttgagcagagcataagtgaggtgatggatgaaatcttgtaaaggtctgggacaccagcatcccaagcagaaggcagatgttgggttctgagatggggaccgagtgtggccagcttgagggcctgccagaggctgtgcggccatgaccatgagcaagggccttgtaggacatggcaaatactggatgtttgttaacagcagtgggaacgtgttactgttagaatatcactgaaggcatctgtttcatctctgaaactcccctactttatcttctacctctgcatcaccattactgccacccctctagactacgcaagcatgatcctttcccagggtaccataatcagcttctaaaagtcttcatggcatggcgatctcaggggaactgatgctagggaggatgggagaccagctcagtgacaattgctgttgtccctgggtggtagcaggggaagtggtgagaggtggttagattctcagtctgttttgaaggttgccaactggattggctgatggaatagatgaagaaagaaagaggaataaaacttgactcctaggcttttggctgcagcaactgggtgtgtggtggcagcatttcccatgaatgaaagactggaaggagtgtattttgggggggaaagtgagacatgccatttggtcctgttacgctggagtgtgcattagctatggagtggaagtactgagtagctgctgtgtgtgggagggacctggggctcttccactgctttccttggctgacagatgattctctaagtggggagacttgataagatcatcaggagagccaacgcagatggaggaggggtgaggaccagggactgagccccagggcgctcctgtgtttagacacgtagacgatcaggagactgtggtggccgagaaggttggatgaacacaagcgcagcctgttcccctggaagtcaaataaagaaggcaattcaaggagaagagaaccactgtgcaaaattctgctgcgaacttttatgtgtgagctgtataaagccatggagcgacaggagctgggagccgacattactgtttacaatgcaggggtgtactgtgtcttcctgaaagtcacttagtattgggtaggggtgtggcagttaatgtcttctgaatttagactgtgccgaccttcaatcttttaaagcatatttcctgtttattttcccatagctaacctttatagatgcaaaaagcaaaagccatttccagttattgtattggtattccctgggttgtatctggggattctcatatgctgtcgagaacaaggtatatttgggtaacttacaaagtggagatttcgcaaaagcctgtgggaggcattaggagctacaagatatgtgggcacgatgagtgagttccagtaagtggtttagccctaaacctggtctctctgcctgacacctgttctcagcatttggccccatcttccattcagttgtgcaaaccaaacattggctccagtggcacttcctgtctctcccaccatccttaccgtccggaagccctctcgtccactctgcctcacaccatgcacacccttgcacctgcagctgcccccaccctaccctctggagtggctgcagagaacagccttccctcaccctctcttgcccttttgtctgctgtccactctgaagcctgggttatattttaaaattaaatctgatcgcgttacctcccccacttagatccttaccatggcctctctcattgctcacaggacaaagatcagaatccttggagaggcgcaaaagcagcacacggcctggccctttctcctaccctggggccctgtgaggccttctctcccaggtcctgaattcgctgttccccgcccctgcaacaccttccccagacacctcttggcccttgttgactgcagctcccaccttgtggtacagctcagcagggcccgtcctgacccctttgtgtgggtgacattcctgtgtcatattcttcatggcactaaactctttcacctgaggacatttcctttcacttgcagtggcatggtcatagttattcatgtttcatctctccggctgtgaactccccgaggcgggagccgtcgctatcttggctccgactgtggctgccacgtggagacgttcatgtgtgtttgttgggtgaattaactcaagtgcataataacaaaaacaaatggaaatcttcctctggaaagacggaagaccgttagggtcagctcacgtggaaacagctttgcatctccatgcccatccccacttctgggtcctccttactgacccgcgacatcctctccccacctttctccctctctctgggcactacagctggtcacttcccacacatggtcgcatgagtagaggcttagcaaggagtgcgttatggaggacagatttctgctactgacttcgccgaagtggatccacagcttccatttggctcaggctctttgggagaatttcacttcttttgttacctctaatcttacctatgtgtaaccacacattttggtctttttcttaaatcttttagataatcatcagataagtttacttacctgttattctactactttctgccttgccttttcttcaggccacccccaagtgctataacctgcccaaaggttaggacataacaccgctgccacacgtttatctctgggcataaccacgatggcataaacaccagcattcccaatttttctttgtctcttcggaatgctgacaggcaaagaagagcattttctttagtctccaaatgtgtggctcacgcctgtaatcccaacactttgtgaggccgaggcaggtggattacctgaggtcaggagttcaagaccagcctgaccaatctggtgaaatcccgtctctactaaaaatacaaaaattagccgggtgtggtggcaggagcctgtagtcccagctactccagaggctgagacaggagaattgcttgaacctgggaggcggaggttgcagtgagctgaaattgcgtcactgcactccagcctgggtgacacagcgagactccgtctcaaaaaaaaaaaaagtgatgtgtgcttattaaaattgctgcatgtatttactaacaagagtgagaagattgacaagtttcaaaacatgatttagattcagtttacttggccaagtgtctctctctctctctccgtaatacatatatttcaaggaaaatattagatattacaaaaagccaccctcatcttttactgtcttatcaagatgagttattttttccaaaatatcaatttttaggatttgattttcctaccaattattaagatagacctttaggatggagtgaaaatattttagtatcagttagtttattctaagctatgttttttttttttttagttttttaaatctttaaaattttacatgagttatcagtgaaaccaatataatccaagatgtttctctctctctctttttttttttgttagaaaattgccccacaaatggtttaggcaaggtaaaaaccagaggtcgataggtagattcatacatacctatcccttgttgctgttcttggtcaaaaattaaggtgaggagttgccctgttgtacttctgtttcagattaagactgtcgaattaccccatgaaattgaatgtgtattttctccattttagcactgtaaagatcagaattctgtatctaaaaacttgtctaagtctgcaattctttataaagggccaagtccatgtttttaacctcactcgaagttgtcctttgaacatcggctgtccctggcaaataatgattgactctgggcgatttgtctccactgacatatccttaacaggaatcaaaagttacggcagctcctgagttcagcggtccctacgcgagtaacagcagtctgtgagtttacatagttgtgggtcctggctgagtcattttatatctcaccatgtggcttctctctactcagtaggtgagtggaagtgtccaaccttaagcagacttttctggaatcaacaaaaccatgtttttattgctgcagccttggcgaggaatccagaagtttcgggttggctttgaggtagccattctgttgtctgcacatctaacgtgcattcccatgcctgtttaaggtggacttttaataatctaaatggccccagtagaagacatttcagtaaattggggaatgcctatacaatgtaacagcatgtagccatgtcaaagtcccgttgaggaagaatacttagtgactgacatggtttgcacctgttccctccaaacctcatgttgaaatgtggcctccagggttggaggtgggcctagcaggaatgtttaggtcatgggggcagatcccttatgaatggctttgtgtcgtcctcacagtagtgagtgacttctcactttgttagttcaggcagagttggttgtttaaagagcctgggaccacctcctctctcgccatgagatgtgtgggctcccccgggccttccactgtgcgtaaaagcttcccgaggcctcaccagaggccgagcagatgatggtgccgtgcttgtacaggctgcagaactgagagccaaagtaacccctgttttctttgtaaatgatccagtctcaggtatttcttcatagcagtacaaaacagactaacatagagacactggaaagtgtttaataaaaatgctgggtaatagttactgagcataaacgatgtgccagacacatatgttcatagatttcatcctcaaaaactacatgcgtgttttcccaagttcacagagtgagtggtaaccactaggcacctctgcctctgtaccatgtatcacctcctttttattttctaaaacaatgcataggataaccatcacagtttctatccaacattacatacacatacgtgtgtgtgtatgtctggctctctggaggcaagatgatgggtgattttaatttttttctttgtgcttcccagtttttctgcagcatagatggataaatgttataaaaagaaaaaaaaagagtggatgtccttagcactaggtatgtttagaccaagtaggaagagaaacagtttcaaatcagaataatgatccaccttcctacaatgtgatgtgccctgatgtcttcattactgggagaaattaaggactgaccacagtcgactctgcaagggagaccggtttttgtgcagttgttggacacttgcaggtgacttgctcaaggtcaggatgaatctaaaataacattcaagctcagttaaagaagtttttttttttcctacaaaagtacgtatttaggatgctttgcccaagctccgctttcttttttattactctgagagctgcttcccttgcctgagaatccccagacctccttacctctgtcctgtgactaatccccacttgtcaatcatcttggagaaaaaatttccctccctgcatcatgaccatccttgtttcacatattaaagcagctgaaagcactaaaactcttttattccacaagaggctcttcccgcctctccccagtgtggagttgaacccctgcctccgtgcctccattgtgtcctggcagcactgtgtcctggtggcagcatcttcagcaagttacttgttttgttttgtttttacctaccagaaagtgagttctgcaaaggcagggactcatctatctgacagtctgtgctgcccgtgcattgccggcacgcagggtgctttccagagggaagtgacacacatgtgcctcttgtgaatcgtcatctcaggcatgccagctcttgaggccacacttagactaagatgtcagagaagtcagtctcaggtgcaggagtcaagaaaaaatagattgggtagagaataagagcaattttgagagcctgatggaaaaaccaagcagacattaccaaaggatgaaggacacgagcctcatgcttttactaagctgtatgagtgacatggggaagcaacttatgttattagtgaaaggttctttctctctctctttttttttttttgagacagagtctcactttgttgcctaggctggagtgcagtggcgcaatctcagctcactgcaacctcggcctcctgcattcaagcgattctcaagactcagcctcctgaatagctgggactacaggtgcccgccaccacggctggctaatttttgtattttttgtagagacggggtttcgccatgtaggccagtttggtctcgaactcctgaactcaagtgatctgcctaggattacaggcgtgagctacggtgcccggccgggaaaggttgtttttaaatttttttttacttttatctttttgagggtctccccctgttacccaggctggagtgcagtggtgcagtcactgctcactgaagcctcagccccttgagcttgtgccatcctcccacctcagcctctcatgtagctgggactgcaggggcatgccaccgtgcccagctaattttttaaaattgtattttatagttatggggtctcacaatgttgcccaggttggctttgaacttgggcccaagtgattctgctgcctaggcctattgtacttgcatgatggaaatggaatataaaggcctgtgttgttttaatccacatttatggacaagttagtctcctgttgtcatctgtgtcttctgaaggagtcacctgtttggttaaataaattctggccgttttctcttaattcatttgcctgaaaaaaaaatttttattctacctctcctttgaacagcatcctggtggggaagaagttttaagggaacaagctggaggtgacgctactgagaactttgaggatgtcgggcactctacagatgccagggaaatgtccaaaacattcatcattggggagctccatccagtaagtacattttgggggccctttcttatttgtatttaaggctatcagatgaccttaccctagtctgtaagcttgcatgtatacacattttaaaaggagtaaagcaaaaacaactcctgattttaggacaccattttttgttataaataaattgaccaaaaatgtctttgcatttcactgttgcttttttttttttttttttgagacaggtcttactctgtcacccaggctggagtgcagtggcacgatcatggctccctgcagcctcaacctcctgggctcaagccatcctcctgcctcagcctcttggtagctgggactacaggcacacacctccacgcctgataaatttcatagtttttgtagagacggggtttcaccgtgttgcccaggctggtctcaaactcctggactcaagcgatccacccacctcggcctctcaaagtgttgggattacaggcgtgagcccccacacctggcctggttgcattgtttactggcacttcgttttagtcagcaggctccaccccacagccatgcactggggagtctgctcagtcctagaaattccatggggcagcacgttttacaaggtggggagaatcaacccagcattgctttctttccttttctgaccaaaatatttttattaagaaccccacttctactttcattaggccaaggatattttagttctaaaaaatgatttaaaaaatataaaaacggagctatgtgaaatgaataagctctgccttctgtagaactagcacattgtccatattctactcactgtaccccagaccttcgagaatatcagctctggaccaattcattgaccaacttttgggaaaacactggcctaatttggcttttcttttctttttttttttttttgagacagagtcttgctctgttgcccaggctggagtgcagtggcgcgatctcggcccactgcaacctccacctcctgggttcaagcaattctcctgccttagcctcccaagtatctgggattacaggcacaggccaccatgcctggccaattgttttgtatttttagtagagatggggtttcgccatgttggccaggttggccttgtactcctgacctcaggtaatccacctacctaggcctcccagagtgctaggattacaggtgtgagtcaccgcacctagtcctaatttggcttttctataaacactgtgctgtgttacggttttagacccctctgtggcagttgtaaatgaccatgttaaatgttactagtctgtcaacctaagttatcaggaaaatcgctgaaaacttggaaagaagttgccgagcgctctgagcttctggagtggatcctggggccgcacactcagctgccctgtccacctctgggagtgcctggctccgtcctgccttcccacttgtggtgcatggttagcagcccgccagaaggggacaaagacctgctaggagcccgctctgctctcgtaagaaaaaaatggagaggcaaatagcctcattctaagtgagcaaactgagaaactcttaaagaatataggaaaagtcttatcgtataccactgatgatccctgtaatgactgtgaatgaagaagaggttacattaggttctttgtagaaggctcgaaagtaggaaatccatttgagaacaacttcattgagttgggaggtttgtttgattttgtttttggtggtaggagatatgtactttgagggagtaagcttcattcatctgacaagtttatttgccccgatattttcatcccatacttcacaaaggcaaagtgtcttagggtcatcagggaggcctgccgttacacatgcctgatcccatccttgtttccagctgtgggtcaggtttcaggccctgactgtggcacttctgcttcacctgcccactgggcttccccctggccagcctttaaacacactgtatttttgacagcttcagcctgaagttgaaatagtttatgactctaaaactgggagactgcagggcttaactgaagatatcatacacgtaagagatacatgcacaatctcaaatggaatttgagaggacagaagggaagaatcagtcttcagctcctccctgaattacgtgtcgcaatctgagtctaataaatgtgtgtgcacatcagcatgtacagagagctgtcatgggtgctgttcgaaactttggaactctagatagaaaatatctcttggcacttaatctgctactaatttttgctgttaaatcagatggatcaaactttgtgtttaatagctaaatgttgaatctgaaatggtaattactgaattataattttaaaaagtctcaaagtcagcattttggaagtggtactttcatagatttttaaattccataatgtgccttatcttttcattgcaggatgacagaccaaagttaaacaagcctccggtaagtgtgaccatctcaagtatctctggatgttctcgttgtatttaatacttgtcaaactgaaggcagagggtttttatttacctgactgatgccagcacaggtctttctagataaatgaatatgtaacctactggctcagcaagtattttttatttacggaaacctgtcagtatgatttgttaggatggcgtgtgtgtaatttttttaaggctgtcagtaaactacttttttcatcataattatcaatatataccatttgaagagctactttttatggtagcacgtgcttctgatctaaaagatttgacacaagccttattttcagagaacttaaaatctgaatggatagtggttttattacttaaatctttaagggtgtgtctcatgtcttcttcatctttaagtctcttgggcatagtaggtgttcaataaatacttgtcagatgaatttaatgaaattaaataatacccttttgacttacttttccttgggaaaggaaaataactctggcaatactagttttatgttctgattcactagcctttctctctgaactgaccatctcacttatatttgaagataaatgtagggtgagaatggaagagcacagcctaagttcctgaaaagtacaagtaggcaaaatagtttctagtgtctaattaaaggactacaggggaaagttttgcttaaatcaaatgacaaaaaagaaagtataatttttcgttttggtgtaaattcttggtttcattagagaaagtgcaacagcaagaccccactgagcttgtgtcgagaactggtgagctgattttttgagctgttgctgccaagacatcatctttaatctacaaaaggatcaaagcagttaatccaataatataagcataaaggccacatttacctcaacatccctgatagtacaataaaagtcttgtgtaatactatttagtacaaagcaattttttttatattctctccttattcaagaaagacttaagttcaatgtgaatgatatgagtacttccaggagataaaaagttgacttcagaatttcaatggcctctgtgacaattgcttagaatccttgctgtgagttcatttgactttagcatcttttttgaggctactttttggacagctgaaattctgtgttgcataaagtttttcctttttctctgaagtctcttaagggaagaatatatattttttttatcatgtgttcagcatgttaatcattttggtataagtcatttagctatagcaaaacaaaggtttaagattcattagatgaacttagatgaccgcagggccagccgtctcgctaaccataaagactacaagcagaaaacacttgtaggtgtaagattgtacatgtgtctcctgccataactactttcagtttaaaggacaaagactttcttccttatttgcttttagaacacgtgtattacagcctatactctgttggattaattgcccattactatttattgttcttattttctattttaaagtggcagttactttgatactgagaatattttgggaacagagcaagtttatgtggtaaattctgggactttagcttttagtatcaaagaaagctttcctgacaacattgaggcacagccctttgtgcgttaagacatggcttacttcattccagcattagcagttgatacttgatcagcttgttagatgtagaaggtctcactgaagtttgagaatcacactaactttttaaagtagatttttgtttgtttgtttttgagacggaattttgctcttgtcacccaggctggagtgcaatggcgtgatctcggctcactgcaacatccacctgctgggttcaagcaattctcctgcctcagcctcccgagtagctgggattacaggtgcctgccaccatgcccagctaatttttgtatttttagtagagatggggtttcaccattgttggccaggcttgtcttgaactcctgacctcaggcattcgcctgcttcagcctcccaaaatgccgagattacaggtgtgagccacggcacccagcctaaagtagatgtttttactctcttcagagattttacagattaactaacttctgagtattttttaaacaactcttctttattgtgactttgcttcagtgagagcagaaccggaagaatgtgggacaagaacttgctggcctttttgagaggccataagcagatgaaatgaaaggaaatacatgagcatttttctggatgtatctttcttgtgcttttggtttagtggaagtaaagagtgtccttagggatttcttttgtcatgtgtctgtataaccatcggccgatctccaggttgaagaatgtacactgtggtctaaagttttgagatgttgcctgcttaaaatatctagttgaatagtgaaataaaatgcagtaaagattattagcttgaacctgccctaaggaaagcatagtgttaagttaccaaattaagatatttgtagacttagaaatcatgcattttaatctaacataaatgtttctatcacatttgcttacatagagaatattagtcgtagcaataccccttcttggttatagttttgaaagcattcttgtagaagttatttggtcctcacagtgtctccatgttagacctgccaagggaggtaggtacattgcagctgggaagtgttaagcacccggctcacagacgtgctccagaaccatctagcacccatctcaggctggtcagttgcagtcccttaagcttctcctctaggttctgggcttgccgtgttagacatcactctgtcagtattttaagggagataggcttcccactaaagtttacgttagatgaacttataaatgagatgactctgattcacaaaagcttgttgggctttgcatgcttttcataatttatggagcttactgtaatttacactgattcacatgacttttataagtcattatgcatgacatacttattttacttttttgagacggggtctcactctgttgcccaggctgcaatgcagtggcatggatctggactcactgcaccatccacctcccggggtcaagcaatcctcccacctcagcctcccgagtagctggaccataggcacacagcactgtgcccagctaatttttgtatttttctgtagagacagggtttcaccatgttgcccagactggtctcgaactgctggactcaagcaacccgccaatctcggcctcccaaagtgctgggattacaggcctgagccaccatgcccagactttgacacactgatttaattgttaacctctttttactgaagttgaacctcgaagtcatggagtgaacaggtggcagagccaatcataaaaaccatattctttctccttgttcattgctgacattctttgatagtcacgtccctaaacccaagtgaggccctcagagcactgaccactaaagaccaattacttttccatcaaagtgcaaagtggtaattcaaacttcctttaactgtcaagcatcctgggctacagagccaagaagataatcaacaatcaaaaggtgatacgattatttcaagttcccctctttagagttcatggctgttgctgatgatgctggtgccagagtagtgttttaaccttagcgctctcccatggtaaccacaaaggcagcaggagggcaggtgggaggttccagagttgtcagcacgttggtgaaatgcctgccctcattttaacgacgccgtggatgtttgtgtttgccttccgttggctgtttcaaacttaactttctagtttgacaatcatattttaccttcagtgattcttttgtttcagaactgattgtgtcctctaatagctaactaatatttttgtatattttgattatttctagtaatttttgttaattttattcatatatacacaatttggaaaatcctcttgctgtagttatgaatactttttatagatgctaagattttaaaattgctggaatagataataaatttgcaattttatttttaaatgacttaccttttttcccctactgtgtcaggaaccttaaaggcggtgtttcaaggttggtgggtctcataactgctttgcttgcttttccctgaaaggggtctgtcttttcacgggagtttctctaacgtgctttgcagagtgatgcttgccttactgcaggccgctgattgttttgctaatgctttttatctttgctttgggaaactgcagatctgaagctgtcttatttatggcaacttctgtttgaggccctaatgcttatgttggtgtggaacatcaaaagaatgcttcttaacccattttcaagccccaaaaagttgatatttcactagaccttagcttttcagctgttggagaagtatgcgtttttccagaaccattgtccattcactttagtgctactcaaaagagctgctcccagaaagctctggaggataaaaacagggcttccttatctggggatttgctgttaggctgacagtgaccagctggtgacaagtgtgacgccgggcacagcagtcctgtgaggctggtctggtgtcttgctggttccgtctggtcagaattaaagcagccccccgggaaagttggcctagaatgtagaacttaaaatggcagtcctcttttttctttttggttcacatatatttaatgtaatttaggtacacttttttacatctgtcagatttgaatgaaataactgatgtttttattgaacattgtgttcatgcttttgaagaattaaactgctttttctaaaggtgacgtgggattgtgtgtatgtgaacatgaatgtctgttttcagtttctgcattatttagatgcctagcgtgtgcaagatattttatgtagcatattaattttgaatgtttttaaattattgaggttatgtccttaagtaaatataatgattaaaatgttttactctggaagaaaacaaagttaggcattttagtgaaaagaagtttataattttccctttcgacatcttctgaagaatgcattgcataaaatattgtgttcttattttcaaacaggattttagtcaatgaaataagttcagcattcccttgaacttactttactttttcctctcgtgtttcaggaaactcttatcactactattgattctagttccaggtatgtggtagctttcttttaaagcagtagtgggtgggagggctcatgggtccaggttggacaaggtgcgtcccccaccttctgggttcctgggcctgacactgtgctgtctcagcaaccttctgctgaaggccagactgttcagagcactcagcctcaaactttcaggtagccgactgtgaacactgtccacagccacgtgatctagctggctggctgcatccaccccaaggaacaaacagaacaattgcatttccttttcccccagggcagcatcttaggcggccagtcccacagcacctccctggctcatccaagcagacatttccttcctttcaatccatgtctgtttcttaaactctagtgattacatttccctaaacatgggtcagttttcctttgtcatttttattagctttaaagttgaagctggtaatctatgtgtagcacgactcaattgttctaggcaccagatttgtttatgatagtccaagtgcacattaacatctttggcagctctaccatattgacttcagtagtagccacttttttggacccaagctcaaaaccacacatttgtatttcatcctgtcaaatttaactgcctcagtccgttggtgttctggaatattccctgcctgcaggcagtatttcaccttactcttcattaacaagccagtttctttctaaagtgaaattgaaaaaccccaccaaaccccactaagacaaaagttacacttgtaattcttatgaaagtttcacttgtaatccttatgaaaggattatacttgtagtccctatgaaacacatatgtataccaagtctatttctaaagcctacacattaatttccatttttctaagaaattaagtcaaagatcaaaatctaaagattcaaatctaatttaaagattcaaatagaggccaggcgcggtggctcacgcctgtaatcccagcactttgggaggccgaggcaggtggatcacgaggtcaggagatcgagaccatcctggctaacacagtgaaaccctgtctctactaaaaatacaaaaaaattagccgggcatggtggcgggcgcctgtagttccagctactcgggaggctgaggcaggagaatggtgtgaacccaggaggcggagcttgcagtgagccaagatcgtgccactgcactccagcctgagcaacagagcaagactctgtatcaaaaaaaaaaaaaagattcaaatagaaattatagctcatccctcctttgtccctgatttgatttgtaatctgtaatttatagatcgaaattctatgcatcaggactgtaaatttaggcttttttttttttttttttggtgaatttagacctgtggaccacacaccaagtagtctggccattctgtttcttaaccctttaaatccacttcagcacaggtagtaaagattagattttccaaacctaagcttaaagctgtggtgttaatggcagtgttaatcatcacagggcccatactcttcaactttacagctggtggggcattcattttttggtttgtttatttttgttagtttgtttttgagacagtctcgctctatcacacaggctggagtgcagtggcgtgatctcggctcactgcaacctctgcctcccaggttcaagcgattctcctgccccagcctcccaagtagctgggattacaattagctactgccaccacgcccagctactttttgtattttttggtagaaggtttttactatgttggccaggctggtctcaaacttctgacctcaagtgatccgtctgccttggcctcccaaagtgctgggattacaggcgtgagccactgagcccagccaagtggggcatgagttttctcataaagccagcagggcagagtgattcctagtatagcagggcatgtgttacactcatgtcacttttagcaaatccacgttgccttttcagcaaaattcattacagagttaagaaaaacatgccctggtaattttctgttagaaggagcaaagattttgagtccaccacagtgcacatcatgtcagcatcattgctttttgtgtctttctagttggtggaccaactgggtgatccctgccatctctgcagtggccgtcgccttgatgtatcgcctatacatggcagaggactgaacacctcctcagaagtcagcgcaggaagagcctgctttggacacgggagaaaagaagccattgctaactacttcaactgacagaaaccttcacttgaaaacaatgattttaatatatctctttctttttcttccgacattagaaacaaaacaaaaagaactgtcctttctgcgctcaaatttttcgagtgtgcctttttattcatctactttattttgatgtttccttaatgtgtaatttacttattataagcatgatcttttaaaaatatatttggcttttaaagtatgcaccgtgtttgcctgtttggtgtataattgtctttaatgtttagaatctggttatttagaggattccttcaatgtgttactcatccagacccacagaggccatatgactggaggtgcgggaaataggtttgagtgtctcctttcacatcgtcacatctcattgagtaaccatgtattgtatgcttccgatatagtttctttttttcaaggaaattaagaaaggccagaaattatagtttaaggatttctaataattgttctacttgaaatagatcttaaaaagaaagtagcggctgggcatcgtggctcacacctgtaagcccagcactttgggaggctgaggtgggtggatcacttgaggtcaggagttcaagaccagcctgaccaacatggtgaaaccctgtctctactaaaaatacaaaattagcagggcatagtggcgcatgcctgtaatcccggctacttgggaggctgaggcaggagaattgcttgaacccaggaggcagaggttgtagtgagctgagatcgcgccgttgaactccagctgggcaacaagagtgaaactctgtctcaaaaaaaaaagaaagtagcctacagggcctataagagagacttcttatcttcactgattgaaaaacatcagcaacttaaaaacacatgaaccatgagagggcatcgcaactgtccattctctcagcttacacgtatcattgcaaaggcactcacagcttcataggttctaaagttttaagaattcctcattcagagagtagaattgtttgtaaactcttctaaggaaaggctggttttctaatttgtaaggagattgtgggacattggaatctgatctttgaagaaatttagcggctagtgtcaagctctgaagagttctggtgtggctctgtctcctcctgggggctctaaggggctgattcagtcatcttacttcccatttattattctctgccttatgtgttattcttttaaatgtggaaacttgaaagctgaatttgttagaacccagtacatgtgtcattggctgtgactgcatttgcactggcatgagctgacaaaccacgaggttcttcagaagtgaccgcgtgcagtggaaaggaattgtgttgttcttacagagtacaacctttataatcaaataggatgcaccgcctttgccttctttagtcactgaaagttgacaagtagtttctatttcaaaataaattacaacacttgttaagggacctatgtaaatatttcaatatttttggttgtgatttttagctataaagcttcacattttagtagtttttaaaacattgctcctaaatcaactatgaagtgaatcgaagtgggtcagtcgtaccttagatgacattaaagggttaacttgtaaatcatttttaagatgttgagtaatagcatctgtatatcgttaagaaacataacagttgaactttgacatttttatcagtgactcagcaatttgctgctgtggctggcaatgtttcttcatgtgttttgggaacaacatgtggagtaaaggagagtttacttcctaattttaacatttacagtttgtgcagccagactctcaaggaaagatatttgacacttttttctctattgctttcccttcagagaggtgagagacttcagaggctgccctttcttttcatctgctgcttgtgaaaggaaaacatcttgggcccccagaatcactaaggaaaactcaagctggaaactgcttagggccaacctgcctcccattctactcagtcaagcctctgctcactgagagagaggcatatctgattgcttcctttggaaaggctaatcagaaactcagaagaatgcaaccctttgtgtctcacctctctgtgacctggaagctccctcctgctttgagtcttcctgcctttgcttcaaggtgtcccgcctttccaaacagaaccaatgtacttcttacatatattgatcaatgtctcatgtctccctaaaatgcataaaaccaagctgtgccctgaccaccttgggtacatgtcattaggacctcctgatgctttgtcacgggcatgtcctcaaccttggcaaagtaaactttcttttttttttttttttgtttttgagacagagtctcactctgtcgcccaggctggagtgcagtggtatgatcttggctcactgcaacctccgactcccaggttcaagtgattctcctgccccagcctcctgagtagctgggactacaggcgtatgccaccatgcctagctaatttttttgtatttttagtagagacgggatttcaccatgttagccaggctggtcttgaactcctgacctcaggcaatccacccgcctcaggctcgcaaagtgctggaattacaggcatgagccactgtgccgggcctattccttgactttcttaataaagttgttttcactttgcactgcggacttgccctgaattctttcatgtgcgaggtccaagaaccctctcctggggtctggattgggacccctttcctgtaacacagggactgtattgggtgcacgtgtgtcagttgctcacctcctgggtttgagttgatgattagggctctggttggaacaggcatctcccttcctctggaggtgtctagatgaaggcaagtggaagttctggaagcagattctcctttgcagcgtagcctttctgagaggtgtgcagacacagatggcgtccggatcctcagcttctacctagattgtgggagtttccctaggctgctgtaaccaagtacaccacaactgggtggcttagaacgacagaaatgtgttctcataatttagaggccagacgttgtaaatgaaggtttcagctgggccactcgccctccgacactctgggtggaatccttcctcacctcttccagctgccactggtggccagcagtcctcacctggcggtcctcacctgacagtcctcacctggcggtcctcacctgacagtcctcacctggtggtcctcacttcacagtcctcacctcatagtcctcgcctggtggtcctcgatgtggtcctcacctggcggtccccaccttgtagtcctcacctcgcagtccttggcttccggctgcgtcacccagggctctgcctctattgtcactgacatttttctccctttgtgtctctgtcataaggacacattggattacctaccccagcatgacttcatcttaactaattacatcttcatgatcctgtttccaaatagtcacactgaggtgctggggttaggacttcaacatatgtttttgggggacgtaggtcaacccacagcacattcttttctcaaagtgacctgatgtttatgcctgcgcttcttcctttactctctttcaactcaattcctcttctcccacttttcaggaaagaggcgatcttagctcaggccactgcaacaaaataccttggactgggtggcttaaaaagcaaacatttgcttctcacagttctagaggctggaagtccaagattaaggtgccagcagattcggcgtactcacatggtagggagaggaagcaagctgtctcgggactcttatgatgacacgatactaccccacctcctcatacctgcacattaggggacagggtttccatatgggaatttgggggagacattccatctgtgacagagacctatttctcacccatcctgaattttaatattggatgtgaaagctactgtcaaacatggtacatagtggggtcgtgagtctctgtaatagagacacttctttaatcaaggtaccccaccccaagtcaggctttgtgctttccttgtctggcgtgtgctctgctgacggtgaatcatagagtaggaacggggcgatttagccttctggagggtggttggagttcacatggacagtcagcagcaggggtgatgacattgcattgagcaatatctgttctaccatgctttcactgtctttgatgaaggcctccctccctcaggagtgccctgggagactggtcagatacatgaaatcatcttgtgatatgggtccacagaaaatcaaaatcaaatgtttaatttcactggtatgtgtacatttccattatagacaatgtgattgggaggcaaaagactgtcataatatttttcattaggataaaactggggagaagaaatagacctatgaggtcaaggagaaaaaggaacaatgtacaatttctttctactaagagtgtttctgcatctattacaaaagggtaatggcaaattgcattgatatttaaattccacttagcaaattttaaagagtgatatttcagctttattttaaaatgtcaatatttcaaatgttgcataacgatgccctttgtaaatatttaaactcattatgaaaattttaaagggcaactgaaggtgtttttcaacattcttgtaagggtaatttaagtagaatatgtgaagagcactagctcgtggcaggagcttgttctgactggctgcctctgcccgccaccgcctcacacacctgtccccacatcctttctccatggcctggccacactgtgaaatcacaacataagtttcaagcattgatagtgtatattgagtgaggttatgcactacacacttaattttgacatcagcctgcctgaatgtttttcttgcaaaatatttaaaaaattgctttttatttgttagctcatcagtccaaggcctcagcacatagcctggctcacagaaacattcaaggttttgagttgaaactaaattgtgaattgttttcatattttccgtggcttctaagtctttgatttgattttttaagactctgtactcctaactgtaagttggaatgactaaatctgaaagtattgttttaaaataaaggtaaggcatctttgatactataaagcagggacagaatgaaaaacaccttctctttccggaagacatctgttgtactgaaaatctgaagtcactcttgggcagaaaggaaggcttgggaggcttggagaccgcggttggaaacctggccctcctgcttgctagctgcatcgttttgagtaaattacttatccttgcggaatcttactttcctattgatataattcatgagcaacgcttcccttaggcctcgactagaggtcctgcccactcggaggaccccgtctggtccactggctgtgggcttccccatgggccaaggatgtgcccacctggagcctgtacccctccaaaccctagtacccccacacacagcccaatcctgcctgtaggtctgggtctccccagctcatcctcctgagggtcaccaggctctggggggtgcacatcagggccgaaagagtagccgagggctggtggtcttcagagagttggacaccctggatgagcaggtggggtctgcaggtagggtcttcctgagtgcacttggaccctgcatgtgagtggactggcgctgagaagggaagcggggagctgggagctgactcttccaatgccaccaccatctggcacagaactttgatgaatctgaaaatcctaacttcaaaagtgacctttctggccatttgtcaaggcaggtggatggggtatattttaagacttgtcagtggctgcacaacattaaaacactcggacacacgatgtgtgctcctcctgccccacagatgtaaggggatggtggctcctcagcgggtgaggattgaaatgaccacagagcagccgtccactgctggcccatgtgtctaattcgtgtttgcactttcccatccggacctcttaaagattgctttatgttaagatgaggtgtttggtgtataaaatttgagcaaaacaaagctgattgcagtaattgcagctaataatcacatccatgtatagaaatccctagaaggccaggctggcccagtatataaagctcccctttctctctcctgtgatcactgttgtccactctgtcaccttatctgaaggcaccatttggtttggctccacatcagggtggggagcactggcatttggggtcgtgctgtcaccctggaaggtgagtgtcactccttggtcatcagcattaccaagggcaagggaagaggaatggcagggcccctgctgagagctctgccatctcctgggaggagtggacacagaagccaggagacaatggggagacaatgggaggatggggagatagtgagggggtggggagacaatggggaggtgaggagatagtggggggtggggagatgacaatggggggatggggagatagtgggggctgtggagatgggggtggggagatagtgggggatgatatagtgggggatggggagatagtgggcggatggggagatagcggaggatggggagatagcgggggatggggagataggggatggggagatgggggatggggagataacgggacaatggggagatagtggggggatggggagatagtggggtggtggggagatggggtgtggggagatggggaattgggagatagtgggggatggggagataacagggggacaggcagatagcgggaggatggggagatagcaggaggatggggagatgggggtggggagatagtggggggacaggaagactatgggggacatggagacagtcggggtacagggagagtatggggaggtgggaagacaatgggggcacggattgatgtcaagtctgatgctcagctgcttagcggaggtgtggccggcagaggccagcaggaagaagtgtgctgggcactcagcacctgccagggaagctcagaagcaatcgaaaagggcacgagtttgtccaatagggatggggtgtcaaaggggttctgtgaggagacatattttgtaatcaatcaataatgtctgaatattaagagatcactaaatcattatgtaaatcctgaaacataaatcacagtcttccttgattttttgactgaaatgcgaatattttaatcaagatggaaaacacaacccaagttgttggtgggaaggagacatctgtcaggaaaagtccttaaaaatgaaaaaatagtgaggcttctttctctgctcttctctctagccccagcttctggtcactcctccttcctactgaaggcacagagtccagtaggccatgaagttggacatggaccacagcctccatgaagaccaggagtagaatgtctagcttgagggtgggtgggtggtcccggcatggtctcagttgccatgcagccagctctgcatctggttgtatttggaatctgtaggaccaggctgaagttgaccaagggcttcatgattggcctagaaacaagcatacaaccagagatgggatgccgtgggctccaccatctccactccttttaaagaagaaagaagcaagtgaaacaaatttgctttttgaaaaccttaggtctcccgaaaaaaaaatgcaaaatgttacctttagtccagataatttaagaaaccattaaaatgccatgttgtcatttttagattagaaagtttgacttgttttaatattcttgcagccacgagggaattctggaaataaaggaacactttgaagttgcagtagaaagaatttgaaattcacttgataattttaagtaacatcatatggagaaccttcaccaactttgagaattattgtttcattatcttaatatgctattgctaagctgaatttattttaccattatgattatgcttgtcatgtttataagtcaatagctgtttaaggagagatcatgtgagaattgtcacatggacacatttaacatcagccatgaccatggctcacgcctgtaatcccagcactttgggaggccaaggcaggtggatcacctgaggtcaagagttcaagaccagcctgaccaatatggtgaaaccccgtctttactaaaaatacaaaaattagccgggtgtggtggtgcgtgctggtaatcccagctactcgggaggagaatcgcttgaacctgggaggcagaggttgcagtgagccgagattgggtaactgcactccaatctgggcaacaggtgagatccatctcaaaaaaaagaaaaagaaaaatttaaccttgttataagtaatggtagcattacttcacatttcttttcttagttcgccagttcatgaacatgcacacaaaaatccatatttgtcttggaagaaaacataggcataaatcttaatgactttggattaggaaatggtttcttagataacaaaagcacacacagcaaaagaagaaatagatgaactgaacttcatcataattaaaaacttttgtttcaaaggacaccatcaagtaaccgaaaagatgacacaggatgtgagaaaatacttacaaatcaggtatctgagggacctgtatctagaatatataaagaaccctgacaactcaacaaaagacaactcaagttaaaaatgggcaaaagatctgaatggatagttctccagatgaaagtgcatgaatggccgataagcaggattagcatgctcagtatcattagtcattagggaaatgcaaatcaaaaccacaagatgccatttcacacccatggggaaggttataatcaaaaagtcagacactaccaagttctgacaaaggtggagaaattgtaacccttgtgcattgctggtgagaatgtaaaatggttcaacctctgcggaaaagagtatagcagttcctcaaaaagttaaacagaattactacatgacttaacaattccactgctaggtatataccgaaaagaaggaaaaacatgtgtttagacaaaaacttgttatgtgaatgctcatagcattatttataatagccccaagctggaaacaacccaaaagttcatcagtagatgagtggataaacaagtcgccttatgcctatacagtggaatattactctgcagtaaaatgtactatacatgctagaacatggctgaacctttgaaaacatttgctaaatgaaagaagccattcgtaacaggctacaaatggtatgattcaattgatatgaaatgttcagaataggcaaatccatagagacagaaagtggttacctagggctgggaagaaggctgaagaaaactggggagtggctgataacgggtgcaggatttctttggggattgataaacacgttctgaaatgaattatggtgatggttgcataactctaaatgtactaaaagccatcgaactgtacactttcaatgggtgaactgtgtggtatgggaattatatttcagcagagctattgtataaaaaaactcaacatagtcaaggtgaactcattctctatgcccaagaaattgtcccgtccagcatttctttctttcttttcttttctttcttttttttttttttttttgagatggaatttcactcttgttgcccaggctggagtgcaatggcgctatctcggctcactgaaacctctgcctcctgggttcaagcgattctcctgcctcagcctcccaagtagctgggattacaggtgcatgccacctgatctgtccgcctcagcctcccaaagtactgggattacaggtgtgagccatcgtgcccagcctcagtgtttcttatctcaggagcatccacccaggtcatgccagaaacagggtttcttcttcacacccctcaccttcggcattgcttcctacaatcaccactcggttaagagtggcttcttgtaaagggtgagatgtgaagccagaggaggggcttttactgtttcactccatactttgttcacttacatatggttggaattaaatatatgacttttgcagctgaagataaactgatcgctgatgtgtactgtttgtttctagatagcctcagtggctgctctgtctactctcttgctagtgcccatccctcctctccacctccagtgccacggccctcatctaggctgcagctcggctgctctgagttactgctgcaaaagctcacttcctactcgcatctggatctgcccaggccattatttctgt

SEQ ID NO: 129 - DNA, 664 bp, Homo sapiens
tgcttgactcctgagaccgcggtgtgtggctggagcaagaacacagaggccaggcagagcagcggacgttctgcgtgggactcgcccctaacagctttgacagcatcctggtggggaagaagttttaagggaacaagctggaggtgacgctactgagaactttgaggatgtcgggcactctacagatgccagggaaatgtccaaaacattcatcattggggagctccatccagatgacagaccaaagttaaacaagcctccggaaactcttatcactactattgattctagttccagttggtggaccaactgggtgatccctgccatctctgcagtggccgtcgccttgatgtatcgcctatacatggcagaggactgaacacctcctcagaagtcagcgcaggaagagcctgctttggacacgggagaaaagaagccattgctaactacttcaactgacagaaaccttcacttgaaaacaatgattttaatatatctctttctttttcttccgacattagaaacaaaacaaaaagaactgtcctttctgcgctcaaatttttcgagtgtgcctttttattcatctactttattttgatgtttccttaatgtgtaatttacttattataagcatgatcttttaaaaatatatttggcttttaaa

SEQ ID NO: 130 - protein, 58 aa, Homo sapiens
MSKTFIIGELHPDDRPKLNKPPETLITTIDSSSSWWTNWVIPAISAVAVMYRLYMAED

SEQ ID NO: 131 - DNA, 763 bp, Homo sapiens
ctggctgagtcgcgcgctctgctccacccgacggggctgtgtgtgctgggcctggctcgcggcgaaccgagatggcagagcagtcggacgaggccgtgaagtactacaccctagaggagattcagaagcacaaccacagcaagagcacctggctgatcctgcaccacaaggtgtacgatttgaccaaatttctggaagagcatcctggtggggaagaagttttaagggaacaagctggaggtgacgctactgagaactttgaggatgtcgggcactctacagatgccagggaaatgtccaaaacattcatcattggggagctccatccagatgacagaccaaagttaaacaagcctccggaaactcttatcactactattgattctagttccagttggtggaccaactgggtgatccctgccatctctgcagtggccgtcgccttgatgtatcgcctatacatggcagaggactgaacacctcctcagaagtcagcgcaggaagagcctgctttggacacgggagaaaagaagccattgctaactacttcaactgacagaaaccttcacttgaaaacaatgattttaatatatctctttctttttcttccgacattagaaacaaaacaaaaagaactgtcctttctgcgctcaaatttttcgagtgtgcctttttattcatctactttattttgatgtttccttaatgtgtaatttacttattataagcatgatcttttaaaaatatatttggcttttaaagt

SEQ ID NO: 132 - protein, 132 aa, Homo sapiens
MAEQSDEAVKYYTLEEIQKHNHSKSTWLILHHKVYDLTKFLEEHPGGEEVLREQAGGDATENFEDVGHSTDAREMSKTFIIGELHPDDRPKLNKPPETLITTIDSSSSWWTNWVIPAISAVAVMYRLYMAED

SEQ ID NO: 133 - DNA, 673 bp, Homo sapiens
tgcttgactcctgagaccgcggtgtgtggctggagcaagaacacagaggccaggcagagcagcggacgttctgcgtgggactcgcccctaacagctttggaagcatcctggtggggaagaagttttaagggaacaagctggaggtgacgctactgagaactttgaggatgtcgggcactctacagatgccagggaaatgtccaaaacattcatcattggggagctccatccagatgacagaccaaagttaaacaagcctccggaaactcttatcactactattgattctagttccagttggtggaccaactgggtgatccctgccatctctgcagtggccgtcgccttgatgtatcgcctatacatggcagaggactgaacacctcctcagaagtcagcgcaggaagagcctgctttggacacgggagaaaagaagccattgctaactacttcaactgacagaaaccttcacttgaaaacaatgattttaatatatctctttctttttcttccgacattagaaacaaaacaaaaagaactgtcctttctgcgctcaaatttttcgagtgtgcctttttattcatctactttattttgatgtttccttaatgtgtaatttacttattataagcatgatcttttaaaaatatatttggcttttaaagtatgcacc

SEQ ID NO: 134 - protein, 58 aa, Homo sapiens; identical to SEQ ID NO: 130

SEQ ID NO: 135 - DNA, 1174 bp, Homo sapiens
ttgagttgggaggtttgtttgattttgtttttggtggtaggagatatgtactttgagggagtaagcttcattcatctgacaagtttatttgccccgatattttcatcccatacttcacaaaggcaaagtgtcttagggtcatcagggaggcctgccgttacacatgcctgatcccatccttgtttccagctgtgggtcaggtttcaggccctgactgtggcacttctgcttcacctgcccactgggcttccccctggccagcctttaaacacactgtatttttgacagcttcagcctgaagttgaaatagtttatgactctaaaactgggagactgcagggcttaactgaagatatcatacacgtaagagatacatgcacaatctcaaatggaatttgagaggacagaagggaagaatcagtcttcagctcctccctgaattacgtgtcgcaatctgagtctaataaatgtgtgtgcacatcagcatgtacagagagctgtcatgggtgctgttcgaaactttggaactctagatagaaaatatctcttggcacttaatctgctactaatttttgctgttaaatcagatggatcaaactttgtgtttaatagctaaatgttgaatctgaaatggtaattactgaattataattttaaaaagtctcaaagtcagcattttggaagtggtactttcatagatttttaaattccataatgtgccttatcttttcattgcaggatgacagaccaaagttaaacaagcctccggaaactcttatcactactattgattctagttccagttggtggaccaactgggtgatccctgccatctctgcagtggccgtcgccttgatgtatcgcctatacatggcagaggactgaacacctcctcagaagtcagcgcaggaagagcctgctttggacacgggagaaaagaagccattgctaactacttcaactgacagaaaccttcacttgaaaacaatgattttaatatatctctttctttttcttccgacattagaaacaaaacaaaaagaactgtcctttctgcgctcaaatttttcgagtgtgcctttttattcatctactttattttgatgtttccttaatgtgtaatttacttattataagcatgatcttttaaaaatatatttggcttttaaagtat

SEQ ID NO: 136 - protein, 54 aa, Homo sapiens
MCLIFSLQDDRPKLNKPPETLITTIDSSSSWWTNWVIPAISAVAVMYRLYMAED

SEQ ID NO: 137 - DNA, 107432 bp, Mus musculus
  misc_feature (1)...(107432): n = A,T,C or G
atgtaaatggcagggcttgtgctgctttggaagcttcagtttctggggtgttaggagcaagtctgagggaaactagaaatgagtttcattattattttgatattccatttaaacccaacttaccctttaatacagtctctctacatatgcatatatatatatatatatatacacacacacacatacacacatatagtttattaaaggtatatacacatatactttgattgtttacaagattattacatttgttatatttaaagtgtggtttagttaggcaataatttactctttgaattgatttataagcctctgaactttgggggattaatctcatactgtttttaccaagttataaaaatcagacaaaacccggagaagcaaaactcttccttcctgaacttgttgagtgtcaccacaagagcctacgctgacttgctgttgggattttcagtttcagtatctgctctctgtgggacaaactaggcaggagatcaagtcacataagagtcatagggacttaggagagtaccctgagggatccatgtggggttcttcaagggcagcctgctgcggctgctgctcaggtagcttcctaaggctgatacagtggagctgagttctgagggctggacgaaggacctgcttattggaagactcagtggtgggaaaactgtcatatcagagccccaggcagccattgtaactgaagttgacttagtgaagaattgggtgtggtgcagaggggctagaaggagtcgagagtggatggggtgtgtctttggggtcagagacaggtggagggttctgtaggcatccaggctgagtcgcacgcatttgggtcaagtgaacatgggagatagttgaagccaagatgtgcatgaacttaaagggagtgagggtttgtctgaagtggtgcttgctcctttgcttctggcatagtcattgaatcattgcctgcattgcctttgatttcctggtccgtacacctcatcctagcaggcattgtgctgcaggctgggcacacagacaaaccagataaatcgttgactcttgggctggagagacggctcagtggttaagagcactgactgctcttctggaggtcctgaattcagttcccagcaatcacacagtggcttacaaccatctgtaatgggatctaagagagccacagtgtactcatatacataaaatagataaatcttaaaaaaacaaaaccaaaaaccctttcaccctaaagtacaagaaacgacaagaaatgaaataaattatggactgatggtgctctcacttcattggcttcctaggaagaaaagcgatttaggaagcgccccagcaacactgagagagtgtgtgactgactcacaagtcacaccggcggggttcatacccatgtgtctggacctaggtcctatgccatttcctgtatacccttcacctctcattctgctgaacactggactctattttgtatttgaggagatggcgatgactggcaggtgtggtggtccttgtgcttgcttgcaggagtaaggaaggaaggaaggaaggaaggaaggaaggaaggaaggaaggatggatggatggatggatggatggatggatggatatgggcgcttcaggtcctgtgctccagatcctgcgcagggattgcgtgagtcttttaggaaagactcactgtggagttctttccctgtgcttttccagacatttcttgaatattagtgttgtagctgaagacttaatggcacactgatcaaactgatggctggtgtcagccaagaagtgtagttacatgttagaagtccttaaggatctcaacaagtattgcatcaggttaggaacagtggccaaaaataatcaaatagaaatagcagagatacatagacttctgccacacggctcaactatcctatataatccaggtgtccactacacgatggggcaagtgcgtttggtcactgaccagggatggccatggagagagaggagctacattaattttaggctacattaatatctgggtaggttttggaagaaagtaaacaaggagttaccctgaaagcttttgtgtgaaggggcaagaatgggtatttcttactccaaaaagggaaggagctacaggtgtctcagataatccatcagaggtgtggagtcaagctcctgtgggtataaatgacaaggacatcgcctagagaaggaagaagcagagcgtccccagtggcgggcacctggaggggctgcagactagcaccagtgctgctcttttcacttctacagctctgagcctcactgctgactccttcaccacactgacgtgtggccataggagaatgcactgaggtgccttggaaataaatgacatttgctgccatttgacagtgtcagcaaaggctctgaatgagctttcgagagggtggagtctatgaacctccaaatctgagttaaatttaggacctcagcacatcatagatttttttttttaatttacttttcaagttttgggacaaggcctcactgtgtagccctgaatagctaacctggaacttggtatgtggcccaagatggctttgaacttgagagagagacagagagggagggagagagggagggagggagggggagagagagagagagagagagagagagagagggagggagagggagagggggagagagagagagagagagagagcgcacatatagacattgccataccattcttttaagaaaaaagagctctcttcatcatcaaatgtcatcacacagttccccgagtgtgttagggagtcctgactgggaatctaaggctgctgtggcagtggttgttctccagagcagggtgagtggtctggcacccccaccaccttcctctcatgctgctaatggagcatagtcatgggctgcaccaagagtttgctgtcttggaatagccagcaggaaacgttttctttggctttgtctaatgtctgagagatttcacacctgtatccgtagtgaatgccagacattttgtattggtagaagaatgtggtagagggtgttgactcctcaagtcccagtgacgtagatccatcttaaatggactgttctgtcccagtacaagtcaaggcacacagtctgagaatcagacctgagcccataatgttctgccccttggagccttcctgtgtcatctggatgggagtccattggcctttggttctgtggaaactgagaaccgtggtactttaacacttgaagatgactagatgcttttatgaaaggagggaatgagtctttggagccctcctcttctagggaaaccaatgttaaggcctttagaatggttaccgaggaagtcacttataaatgagcgctgacatcatgtgtgtctgctgtcctgcatgcatgaattgccaggctgagtaccagtgctgactttttgtcctgaaaagctttcctttttatgatcagagctcctaagcagttaccaagtggccacagctatccagatcaactgtgtataagatgagaaagagcaccaagcctgagtgtggtcaagggtgtgctagggaggtcggaaatctcgtagggaacacgaaaaacatcataaaggggtgaggtagcagcataagactccacagaaactgtcacagggcagcccggggacatttcacagtggcatggtagcaggtgctggtgattgatgtacagcgaaggggacagatctctgttggggcaagagtgagccccagctattccactggcttctgccctgagcctggatgccagggagagagctcagtgctggactgtgggtctcagttcttccctgctgcagaaagtcagggcatcggaagcactgggttgatagagctgtagagaggaaattgctttaccgtatgacagctgtacactggccccagtggctgccctagtccttatcagcccttttcacagatctacacttgtatgcatcacaagtactactcagctattaaaaacaatgaatttatgcaattcctaggcaaatggttggacctggagggcaccatcctgagtgaggtaacccaaccacaaaagaactcacatgatatgtactcactgataagtggatattagcccagaaacttagaatacccaagatacaatttgcaagacacatgacactcaagaagaacgaagaccaaagtatgaacacttcgccccttcttagaattgggaacaaaacacccatggaaggagttacagagacaatgtttggagctgagaggaaaggatggaccatctagagactgccgcacctggggatccatcccataatcaacctccaaacatagacaccattgcatacgccagcaagattttgctgaaaggaccctgatatagctgtctcttgtgaggctatgccggtgcctggtaaacacagaagtggatgctcatagtcagctattgaatggaacacagggcccccactggaggagctagacaaagtatccaaggagctaaaggggtctgcaaccctataggtggaacaacaatatgaactaaccagtaccccagagctcatgtctctagctgcatatgtagcagaagatggcctagtcggccattattgggaagagaggccccttcgtcttgcaaactttatatgcctcagtataggggaacgccagggccaagaagtgggagtgagtgggtaggagagcagggtcgggggagggtatgggggatgtttgggatagcatttgaaatgtaaatgaagtaaatacctaataaaaaataggaaaaaaaaccccagactgtagtttgtacattccttccccatgtccccacaccccactgtcttgctatggcatgcttgtgcattgcttttgtgactgtagagtagttaggtttgttccggtttttctttgaacttttaggttgcagggtttcaggcacttggtggctcttactatatctatcgtatctgactgtctgtctatttatcatctatctatctatcatctatctatccatctatatctatcttatctgtctgtctatctatcatctatccatccatctatcatctatccatccatccatcatctatccatccatccatcatctatctatccatctctccctccctctgtgtgtgcgcacgtgtgcatgtgtgtgtgcgcactcgcccgtctctgcgtacacctggtagagcgtgtgtgaggagcagaggatagcttgcagaagtctgctgtctctcctactgtctgcatcccagggatcctgctcaggatattatgcttggcagcgggagcttcacccctgagccatcttgctagccctgtttatagttttttatacctgtttgttccagtacttgttcatactaggtttgattatttttgtcagcttcttaggcgatggggtattacttcagtcttttcgtagttaccagcagcaggctactttccccagtgactgaaaagctcttgtttaatccgaatgtgtaaatacattgtagattgaggtgtgaggtttctctgttgggggtgtggggttgccaagcttttctccagtttgtggtttaagaaattgtactaagaaaatcataacaaaacatttggtaaattaggtccttaatttgacatttaggggtaaaataaacttacataggtatcctcactataaatacatgtgtaggcatattctgaaatggtgactctgagtgactgcctgaatcacactgacatctaggagctgttgccttccagcttggataatttacccaggaggactcccaggctggcttttggaaccctataagagcacagcaggactttgttcctgttgtgcttaggtctatacccaggtctgctttcaaactgggtcacacttcctgtcctcacgacctactcccatgcatgggggactgaggctgttggaagacaaaacaggcaacatcaagtgcctgagtggtatgtgtgtgtctatgtatggtgtgtgtgtgtgtgtcttagagggagagatggggaaaggagggttattggttaacaaagcaatttgaaagtcttaacaagtaataaaacccagtctggttgtgggctagtggctacttgcatctcatacagaaagcatgtgtctcaatgggataaaactcacaggtggccttgtgcaatgtgcttggaaagaaactctaccagagcaagccactcagtgaggtgcttggagaccttggaccagaggaggcctggtagagcatacattttatgtgcgaaaggaaaatagtcacattctagaagcatcctacctgaggactggccaaaaccagcagcaggatgtgaggttcttcgtgcacaggaggatcagcttggcctttgtcttccctggaacagtcttggttttgaatgacactgtggtttctttatagagctagcagtgaagagctagggcgaagctgggctacttcattacatgttttaatgttcaaatcagcaagtgctcagagggatggatttggattgtggatgagtacctaaggtaaggagaggtaaggagagaaaggaaaaattaaataatgtgccttatctgagtaggcctaagatttcatccaggaagtctcccaagcgagccgatgcctctgagctggagagactctgtgtctcatgttcttgagttttgtgagtctggggtttagctgacagtttggactcgagtgcaaattaactgcattttacctaggaccaagttgctgagacagacactacagaacagttgcctccactgctgggcgagtggcgcctgggctggcgtcccaggcccgcattctgcactctgcacattttacaatttaaactctgtgcttccgtcacggcagtttggactgggcattatgttgaggggaggtgagaggctcctcctgtgttggcaccgtctgaccagtgtgggcacagggctgctgcagagccctgatgatgggatgggccactgtactggctaactttgtgtcaacttgacacagctggagttatcacagagaaaggagcttcagttgaggaaatacctccatgagatccagctgcaaggcattttctcaattagtgatcaagggaaggccccttgtgggtggaaccatctctggctggtagtcttggttctataagagagcaggctgagcaagccaggggaagcaagccagtaaagaacatccctccatggcctctgcatcagctcctgctccctgacctgcttgagttccagtcctgacttccttggtgatgaacagcagtatggaaatgtaagccgaataaaccctttcctccccaagtgcttcttggtcatgatgtttgtgcaggaatagaaaccctgactgagacgccaccaacttgatggcaaacacacagcctctctgtggccactgttcctttggctgggtttgaaattaccagttcaaccatggaagaaagttgtgttttgtcttggaaagaacctggagaagaattcaccctgctttcataagcacacattgtaatgtcaatactctgaggagagcttagttccagatcttggtgttgccacagacatgtgtctgtgtgtttgtcaggactgccgaggttacggaagagccatgtgctgactgaggaaaaccatatgccgtcgctcatttccagttattttaggtgtaagttctttcgaggtgaaagtaatagtttaaacccccaatctgtgaatatgctggcatatacccgtctcccaatctatctgtgaatatgctgggatatatccgtctcccaatctgtgaatatgctgggatatacccgtctcccaatctatctgtgaatatgctgggatatacctgtctcctctgtgttccacagttggttcattgttgacgggtgggtgtctctgactgaggccaggtgtgtcctacagtggcctgccactaaggctgtgtgtcaactgcctgcatcctggcacagggacatgatgtctttctcctcacatccatcatggctgcgcatccctgggtctccagtgcagtgcagtgcacacccactctgctaaaatcatcacaggcaggcacacggctgtcatcagatcactaaaatcaacaccaggtgacctggaaggagaaatggccacctgcagtcctgtggagggaggtggggggaggagcaactgggagctctcacaactccttcagccgcctgttgctcccctctccctctccccaccattatgcctcagggctgacagtgtgactttttttgcagagctcagcagatacctgaccaagctgagaatgtttgtgggtccaggctgcccaccttctcatgtggcctgctgggctctgtcggcagtttagttgctccatgaggtctccacctcttcgatgacagtatgctccctggaattctgaatgcagtttccgatgctctggtttctttgtggtctgttttccccttctgcctaaatggcattgctctcttttcttccatcattctctctgtcccccctccctccgcccccaacacacacacctttcaaactttatgttcacacttcccttatactcttgatcctctgcctcagtctcctaggggctggaatactcgccatgtgccttctacctggatgaagttaatggctttacttgccaattcatcccccgtttattgagcatttactttgtgccactttgacctttcacgttacatcactgttggttcccagtctcgtctccactgcattttcctcaatccctgtcttaccacctgttgttcatcacattgcagacttcaagtctgtgtgtatatgcttggagtctggccttgtggcctctgtcactgctgtccatttagaacctctgtcttacctggccagtgtggcagctggccctgctttcagctacttcctgagggggcagtcctgccaggtggctcaggtgacagccttctatactggcacccaggggttatcagaagaggcagcctgagatgacctgtcaggcttgctcatgctcaggcctcagccctgttcaacaaactcccagcctcctgcatggtacaaaccccaggaacatccatgtccttaggcacaccaggtcatttagcttctgatgttggagctctgtgttgtctctccctccctgagcctgcatttccacttagtctgcacatcttcctgagggtccacatgtgcttacaccttgtgttctgggagcctggcacacagtaggtgtccacacttgattctatttagtctgcacatcttcctgagggtccacatgtatttacaccttgtgctctggaagcctggcacacagtaggtgtccacacttgatttggtatctgtttgtgaaggctgtggctctgtggcctttggtgcaggggagttttccttcacagccctgctgctttgaggagcccaggctgtgagggccctgcttgaagttctgctcctacctctcttggtcaagcagtctcactgatggccttggcctgaggctccaggactgattcaccagaccaaaaataaaatccagggtctagatttgaactgctgtgcttggtgtgatgtttactggcctgtgactcgtaatctggggcttactgctgcacactcattacctttggaaaactttatctaaaaacatttttcattacttcagtgaatagccagggcacgaaggcttctttaagacttgtaagctcaggtctagaagatcatttttagatgacagagttctggggtacttggaatcaaaatcgtgtttcctgttttttaggatttttagatatttatggaatagaatttttccttatagtgtttattccagatctgaactttaaaatcctatctgaaagttagtaaaaatattttttcctttaatattctgggataatattaatactttagaattatgatcttttatctcaaaatttaggtagatgtgttaaatgcatatatttaaacacaaaggttgtatttgttataagtgatagctagtaaacttgtttctttgtttatatttcttcacagggcagcccgatggacccaatggtgatgaagagacctcagttgtatgggatgggtactcacccccactcccagccacagcagagcagcccatacccaggaggctcctacggtcccccaggtgcacagcggtatccccttggcatgcagggccgggctccaggggccctgggaggcttgcagtacccgcagcagcaggtcagtgtccgctctctctgtcttccagggctttgttgagagcttttgtttttacctgttgatttctacctattattggtattgagaggatttggggatgtttctgtgatatccccccttttcttttatatagatggaaagtagaactcgcaatcaaatagaccattttatttttctctgtccctgtctccctccctccctccctcctcccctccttcccttccttcctttttttccttcttgaaattgtacttgaacaatgtggggaaagctcctgcttggtaaggcagtgttgccccttccagttccaagggtaggccctcagatgctgacctgtggaaagactccttagggtgaagttttccagtcattcaaagttctgtcattgttgcttgagttaatctggttgttaacccaggatgcccttagactcagtctcccagaggggcattacagctatacgcctccaacctgggttagaagcttcccgggaagttactttgcattgattgtggcatgttctagaagaagtttcagtatttcatttgtgaatttggttagttgtcttgggtaagagaggcctttcctgctcttaaacagaaggctccatcctttcctcccctccagaaccatgtggttttacccacccatgacccctgcttgtattagcacagctcagggtcttcctggttcttacagtttccttgatagattggtcggcggaggcatgggtcctgggaagggcacggttagatccagactcgtcaaggtatttagcgagtgggagcaccagaaaggctgcttacacactgccctagtgtgcctggcatccctgagggccatgaggcgaatgggggagcgctttactgcctccagactggggcggtcctgtaatggtggtcctaaagccggcagtcagcagcagcccttccccacaggaaacgcttctagattttacagaaactcttccttgaggaggcaagtctgatgaaactcttgtcctcttaaaggtctctttagtagtctgagctgtctgctgtagttgagtattgtcagccctcatcttgcagtcacagggaaggatagaattaggtcattaggtcagcccttcagccctagcatggatcctcagactgttcttggtacattattggcaacctccctccacagtgtcaaagacagctctgagtgcaggatcaccctgcttccttttacccgggttttctgccatactttactttcttcagagttgaagcagcagattatgtgtgtctgtagtggggtggggtagggtggggtagaatgtcccccacttcctcaaccccgacaactctcagctgttcccccaccatgaaccttgtattgttagagccgctttcctctctgtgaagaggagaagccccatgtggcagggagctgaaggcctccccttacgtacagtctatagaatggggtgcaaagctctgtctgctacggaaggaaagaggcagagaggagagcggtgggctggtgcaccatgattcttgtgcccgtggctccagcctgttttcccatgattccctgatgtgaggttgtggagtcattctgaaaatggagagccctttctctcgtccctaaggaagtccagggcttgttagttttagactgtggcctagtttaccaaactagagtgagagccaaatataggaagtttgtgaagaatggctagcaaggaaattttatattattttcctcctcaagtgtgtagggtgaaaaatagatctgcagtaagatgtaatcttcgttttcttagctccttggttttatgtagtcccatgacccttacacacttatttgaaaggacaagttgctgatgacccatcaagctttgcagcaaatggcttcagtgtgagtttttaaaacattaataattgtgagtgtatgtatttatacatgtgtgtgtgtcacagcatgtctgtggaaattaaaggatggcggtaggaactgtttctgaccttcaagcatgtgggtcctgggattggactcactttgttcggcctgttggcaagcattgtggcccactgaaccatctctctgccctcagcacatttgcaattaagattttagctcaggtatttactgctaactaaaaagaaatatccagccgggcgtggtggtgcacacctttaatcccagcactcggaaggcagaggcaggtggatttctgagttcgaggccagcctggtctacaaagtgagttccaggacagccagggctacacagagaaaccctgtctcgaaaaacccaaaaagaaaaaaaaaatccaagtcaggtgcataaatatttctggtgatgaaaagaacatggtgaatgttctggctgcagaaatctcaagctttcacgggaagttagtcaaagtcaggcctgtaattggctgtgtgttaacctttcagtcactgcgagacagccttgtctcattttgaattttcaaagactaaaaaataggactaaaaatagtttggaatgaatttctttttgagtgcttgctcacactgtaaaggagacagagcgtcaggtattgatgtttctcctcacccggtggcactgtgcgttgaccccagagcctcaggcataggagcaagccctcaaccactgaggcaaagcctctccccagtgcacacagcattgagaacacagatctgcagaatggttcttagaggtggaaacagagtagctagtaaaggttttgagaagtagttaccagatcacactgcacatacatacatacatatgcacacactgcatgcacacacacacatctgtaggctgggtgtacttgtgcacttagttgcatgtgcctatttaagaaaggtttttaaactggctttaacctcacagtgtaggcaagagtaggtttgaactcctggtcctcttgcctctatctcctaaatgccgggattaaaggcatgtgctaccacactgggcttttggtctggttttttcccccctccaagatctggaaattttaagtgtgtctgcagcaaggtgcaggcactatgattggctattcatcttgccatctcctctggggattaatgtaactggctgagcattgtagtggcgtaggtacagcaactaaggttcttacgaggagtgacgggcggatgataattatgacactgagggtttactgagtggacatcaccacctaggcataggcatagctttgctttggatgccttccaaagctttctgtgcttggtttgtgaacctctaatgagctgagtccagttcatttagtgttgctcatatatttctgcagaggtttgaaatgcaggaattcaactttgtaaattgagttgcccacttaccagctgagtggtaagttgtctttggctcaggggtcacagtttgattcctggctggcactctgcttctgtgataggaatttgaaatgaggattcccttagaactacggtacttgattggaatgccgccctgttaggtcagcgcttagcctttctctctcagttaggcggagctggccactgactgggtgacattagtgttaaagccattggttcttgttttgtgtggtggtcgttttatttttgaaatgtacctgtgtctgacttactgaagcatggtgtggtaatagtgtgctgcttaggtttctactgactggaactagatttgtggtcttcgctcgcttgcttctctcccacatcatcagacaggtacatccctaaacagatcagctttgcaggctcccctaaaacctcgtctatttgatttttttattgagttgagggggaaatgagttttctatgcttctgtggagaatgttctgcctgcaggcttttggagcagacctggagggtcagcaagccggtgatttcatccagtacagagccacccagaagtgcagcttcaagactggctcgcacgcactgactgaggttttcagggctcgcttttgtttttgttttttaacttaaagatactagggtgttctttgctgggtcaggtgtgtggattagcaaaggccttatttcatttttttgcagattctgtactcataaatgtatgtggactgttgacagcttactctaagagattttaatataaaataagtaacagtgataaagaataatgagcatagaagctgagttttattagtgtgggtagatttaaaacaccttcagagactcccctcccaggtcttggattcatgggggtttatgtctcagctgtctgtaccatgctgcgtatctgggaccaagacccctggtccttagacagctgggagacaggaagaattggacatttgattggatgtttttagtttagcggttttgtttctttcttttgagactatgtcttgccaagtgggccagactggcctggaacccagagatcatctcttcctgtcttctatgtgctgtgactaaaggctggtgccccacactcagcatatgagcatttttatgagaagaacccacgtttttagtttttacgaagacctttacaagaaagtgtgggatgtgatcattgtgaaagtggccaaatttagtagaagttagtaacttttgtgaaggtgttttatctgaacatatcaattcaaatggagatacaaactgaattaaaaatggattcttctacagatgacctaagatgagatgaacacgctaacctgtgtttgtttgccatctccccttcctggccatatctcctccactgtatatttatttcagagcagaagcgttttttgttggtatcatctttgcagccaaaatgcatcttcaagtacacattagatagttctaaaaaggaaacaaacattacaattgcttggcaaaaagaaaccttttctttgtggttattaaggcagctgagtggtttccaggatccttacctgggttgttatatttttgatatagtctagaaaggaattctttgtatgcacttagaagtcataacttagtagagtttgcagagctgttgtgaaaggtaggctttgtggagagaaggcttgttcacacaacacttcagacgtgtgcttgtgaaacgcttgtgttaggctctgtccattggaagtctgaaaaggtcctgtggttttggttgtgtctgcaatgctcagctgtcctattttcgaggggcgtgactgagtgaaggagaaggcttgacttgggacagtgttgaggaatctgcgcctgttatgtcttacacttagaatcttaagaggttttggtagtttcatatttgcttacaaagatccccacatgtctgtgtgcgtgcatgctcatgaactggcttataaaacatttgtgtggcattttcccataatgtattctatatgctaaacatagtttatgtacatacagatacatatatgtaatcccacaactacagaagatgaaggcaagggttttggccgttacagctataaacgctgtggggtttattggctatgtggttcattgcattttatgtggttgtcctatgtgccattgactggagctaagcagctttgctttgcagctgagatgctgggacctttttttcactgactttgttgcctctgttgctcatgcagtgaacacgaaggtatctaagttttatcaaaagactcatttagagagcgcatgtctgcttgcttgaggagagatagcagatgtccctagtacggatgccagtgtgtcctatagatgcagtttcctactaaggaagtatttctgaaggaattaaactcctgcaactcttgtttcttgtagttagattgaaacactttgagacagtgtgccattgtcagtaaatttgaattagaagagcctgctgtgagtccctgtagattttcagacctttacttttctagaagtaaggtgggatgcgctttagtgagaactgttaggtgctcctcttcgcttggtttggaagctaccttggcatttgttcttcagagagcatttacagaattctagatatgcggcaggtataatatcctgcctgctctctgctgcggttttactgtattctttcttgtatgatttctactgtgtcttatataaggagaccctcaactcaagatccctgctacattttcctattatagttttatttttttaattttttttttttctgaccaaagtgcaagctttgaaaagtgacatcctgatttttatttcatacatattggtgttttgcctgcatgtctttgtgagggcgtcaggtcctctgcaacagggggtatagcagttgtgagctgccatgtcagtgttgagaactgaggcaggatcctctggaagagaggagcgctcttaaccgtggagctgtccattcgtcacctatagttttattttatttttcaaaggtgtgacttatttattttatgtacatgtgtacactgtcactgtctttagacacaccagaagatttcatcagctctcattacagatggttatgagccaccatgtggttgctgggaattgaactcatgacctctgaaagaacagtcagtgctcttaactactgagccatctctccagccctatagttttatttacggtgtgtgtaaatcatcagtgaggatttcaggtagcacagaatcactttaatacttttaataaatctcactcacttgctgtcacccccaaacccagtaggacatatttatgtgaaattattagccacagttgacctcagtaaaatcaatcaaccgcattcttccattgtttcctgaaaacagaaacaaaaacaaataaaaaccaaacccaaacccccagaggattaaccgaaagagaaagtaagtatggcattaggttgggtggctctcccgctctgctgaggttggcatctctgaaaccagtttggagccctgatggctgctgggatggccagccctgtggctctcagagctccttctgtgatggtcttgaatagctgcatgtgcgagttcaagttcagcgctccttctgtgatggtcttgaatagctgcatgtgcgagttcaagtgcttccaggcttgtttggttgaccaagtcagaatgtcaccccaccctaaaggactgaaattggccggaatcagaggctgggacaacacggtccttgccaattaattaacctgcttgtgatgatagaaacctctagactccactgtgtttatgtgcataattaaggatgtttggctaccacgtttcctggtgtggcttttgcctttgaagtaccaatgagctgatacaacctttgattgcagtatgaaattttagtctgctcatttaatagtcttaaatatctttgggctgatggcttgacaaattgtgttgatgtcacagctgccctcaacagtgtcaagaattctttctaaaaccaaaggagtggtagtagattgttgaaatgagcacagcgtgatcttttaatttttttttacttgtgaaggtattcttgggtaacttgattttgaatacctgtcttatgttagatggaaggcatgcagagtgcgtttctgaggatgtggaaactcgccaggctaatatactttacttagagttgcaaaagaagcaagaagagtcccttggtttctcagtggttcagaaagtaagcctatcttgtgaacaccaaggtaaatggtttaaatgaagcacggttcctctgagctgtcgctgctgttcttctttagcccccagagctctgtggcgtgaatcttgtattttaagatgggtcttatctaaaggttaaaaagaagacatattcttcttatagtagtagctagtcagttacattcttagtggcagtttgattattttatgtgtaataaattgcagatatttgctcttacagtcttgaaaaataatcttaaaaattaactttgtggttgtgagtaaaattaagaaagtgcttccctccctctcccttcctctctgtgtatgtgtgtaacagacaggcagagggggcagagattgatagctattgggcggggactggagagagaagtcactgagatgccttcctcgtcaggagtcctatagaatccaagctttcttgggccttgaaaagaactaactctgtagaggtattagaaacgttggatgttctagagctcagatctgtatgtaagaattgcatataaatatgtaacagacatcttttacatgcttaaagtagttctgtaccaaatttgggttactagataattatatataagaaagtggaagctacccagtttcccagtttctatggagaaatgtgtagtaaacagactgtaacacatagaattagccaaatttatctctctgtattggtatcgactcagagaagaaacattaattactaaaccaatgagccaattagctagccaaccatccagccaatgaaacaaccaactaaccagatccatccatccatctatccatccatccatccatccatccatccatccatccatccggccagccaactggccatcctaccaactgttcatccaagcagtttactagccagccagccaaccagccagccagccagccagccagccagccagccaactagccaatcaactaccagccagccagtcaaccaaccaatcaactagccaaccagtcgatctgccagccagtggaattgactcttcaggttcgtcaagggctataatccaggtcagctttcataaaacagcaaacactccaaacaaagtcagactggtaacagaatgtgcaaatgctggaattaaattaaaaatctgtctttggtgaggtaattatatcttgcttcctggtgattgcaaaactagcttccctgggcagctgtaatgcctagttcctagaagtcttcgagtatatgctggaaggtgtactcctgtccagatttatcacaggaaggacagacaggtgtccagagagtagacctttatgcagtggccttttgcagatggatagtgagggttggacatcgcaggattgtgagttttgtcctgattcgtggggagaagtgtcagagtcaaccatttttggcatgggctctgtgctcctttgaaaagggcagctagaaaaggcccttccttccttcggctttcagatcaccttgccattctgagtttactcttgggtattgcagtagtcaccgtactcgtcataatgcccctcagtgttctagcttcacggggagaaaaggatttattttctcatcttcttaagtgttctatttgtcacaggtcagggagacagatggtgggattttcttcccatgaactggccaaattttgagtagtgggagagaaaaggaaagagaagaatttcctcataaaaatctgctggatcgttgaggagagcggacacttccctcaggcttgatggtgtcttccatattgacttcttcagtaacaaagagcaggaacaatcccggtgacgtcattgctctcagtcttcatgacatcagatgcatcatggcacactttggatagttccaatacataagggatgttcttctaccatggacctgcaaataggagagtaatgaagcctggagcagggtcgaagaggcaggggcttcatcaggattccactctgaggaaaatatcacccatgcgctgaaaaccaccctgatttgaacatcagcagcttgcagcgtggttactttcaagtcagaactgtaatgagggagacagaatcaaggcatggaatgtctgctggcctcggggcacgtggtgggctggttctggttgtgcaggcagtttcttggttctggagtgttaaaaaaaaattcgtttttcctttcccagcccaggtcccggagtgatgactccatgactagttagttattaattacaagcctcccacaagctttggctcattccctggctagctcgtcacttagttaacccattcaaaccaggctgtgtatgcctaccacttggttagttgcctctcctcagtcctgctctcttctttcttcgtgtcttcctcagcatctccctcagtgtctccttgaatctcccttattctgttctgactttagctccttgctggtttatgactgtctctttgcagctcttttcaggtagctctgtctccatctcaaatttccctgagttcgtctactttctggtttacttccttctcggtccctctccatgttctcttgaatctctcttttatactctttcccagaatcccctctctccctgccagtgtcccgcctcctattccctgcctcagctcattggcctttggctttgttattgacaggtgatgcttataaaagattctatactggaggctttgtaagaacacagaatggctttgaacaattccaaagtttctttctttcaaaatatttattttattatgtattcctgtgtgtgcacttgagtgtgtgtatagaggtcagaaggatgcccgtagaggaaggtggatccctggagctgcagtcacaggccctgccctggtgagctgcccaccatgggggatgggaactgaactctcccgtcctctggaacagcagcatccacttttaaccactaggccatctctactttggcaaaagtttctagtgtgaacgtttctcttttgtcatcacctcctgtgcttgtcctacttaatgacagccttgtccatcggctacccaggcacagactggttatctctgctgttctgtccggtagatgagccctgacagggcacttcagaacactttcaaagacaagcatagatttgcagcattgcaggttttggtcagtggactctgtctagcccactgttaaatgttcctggctctggctctgatatagattgttgtgagagtctcaaggaagtctcagtcctgagcgtacgaatacagtcttgctcattagtggcccatcagtatcctgtgcttgtttctgtttgataccacgttgagcctaggatgctgcgcccctgttctatggctgttcatgttgctagaattctctctgggagcaggtgtagcatggaaggaggggcagatggttagagaacctggagaatggagaggggctggattggatgtggctcacttgtcatggaaacccaagccatcatcttcactgtagccatttgctgtgggtattgaggaagactcttggatggtgcagaggctatgctaacagtggacatggtggcctgctgctgctgctaagtttgttgctctggcagagtattccttaatgctggagaagtgttctacatgggatggtagaatagggcagagaaatgggctcagcagttcacacccacgtctgcagcgtagagtttactgtcctaggcagacattatcttcacgtgttttatggggctgagaaactccacggagcttaactttcaagaagagtgcactgcagacctggaatgggaactgttgccgtctgcagtttctgtttctaatgtagaagttatgcttaccccagtgtgtgccttaggctgcttccttctctctcttcccacctctctccctaccccaacagggtttctctggatagcccaggctgtactggaactagctctgtagaccaggccgacagcctctgcctccagcctgctaggattaaggcattgagtggctttcttaaagtcatctctgtgcttttgttccagtggatagcctttgaagggcttccaggaattcagtggattagtccattcttgtcattgtcccctttgtaggccatgtctttatcattgttatgttttccttttagtgtaagtaagccaaacagttgtcactagacggcagagtgaaagtctctgtcaggtctcctgctaagtacttccacactgtccttctttaacccttctgtgtatttatttattttttggcatagttatatttaccaagtatgtggtctgtctggatcagtgttggtttggggtagcccatgccgtcctcacggccttcagggaagaaagctgatgtcatccttaccttgcagatgaggggactgagcgagcaaggttaatcagctgctccacttcacactcgtgctgcacagtagagcaggggctggccgggtccgcagccttggtcttaagtcggtgtacatttgtgattctaagaaacggagcaatactcagcaccaggagttcacttgagtatttaaagagttgataaaatcaaagaaggttccttttgacttctgaacgttagttttgtggaaagtcttttgtgacgttcagcatttggaaggttggctgtgggtctggagatgggtcagtggctaagggtgtgcactgctcatgcagatggcagcttgattcccagcacccacatcaggcagctgcagagctggtggctccagccccacagcatctgtcaccctggccttgcaggcacccacactcaggtaagcatgtgcaagtaaaaataagaagaggaggaaagaacctgcctgccgcgcactgtgctttcagaaaggaagctgcctgctgctctctgtgatctcagagcagagttgtgagagacaatccatgtaacataaaatgaaccattcaagagttcattctgacacttacagtgctatgcggctagccgtccgtcttctgtctgtcatctcaggcgctcggcacacccagctgagactcgggtgctagctgagcagccaccctccgccatgctgctggcagctgctagccacaccttccctctcttgttctgggtgtttcccatatggatcacgtcgcataggtcgccccagtacattgtgtggactgactgtgccttgtcctttcccgccctttacttccagtgagccctgtggttaatgagcgtatgtcggcgtcactggagggtgcagttgctggatgatgcggccatttgcctttctaccttgtgcagctgctaagctttcccactgtggctcctctcccactgcagaaacgacacttgagcattggcctttttatttcctgaggtaataaatatcagggcacctggctgagccttttcctgtctctgagactggggctggtccagagttctacatatgcaaagtggacacttgtgctaatagagagtgtagcccagaaggtcataggcccagagtttctcagtgttagggaaggctgttgtttgtggtggtgtggaaacctcactgttaacagtggatggtcttaaggcagcaatgcttttctctcttctgtgccatggcttgccttgctttatgtgctccagaaccatcctggcatgtctctactcttctccatccgtccatccctccatccctccatccactatctatctatctatctatctatctatctatctatctatctatctatctatctatctatctatctcatggaggtcagaggccagtttgtgggagttgtttctttctttccagcacataacttggggatcagatttagtttatcagatttgtggcaagagccatgtcacaggccccccccccacaccccccgctttgtctttttgaagaccaggctctctcagtttgtgcttggagtagagaaatcaattatttgaactaaagtgattccctgtataaacagttcacactttaagatgaatttacttgcttttagtttaacatgtgggttgaatgtgtgctatgtgatctcccaccagtcactgggaatcccaagagaacctcagaagggagactctgaaggggtgaggcaaagaatgagagaaactgagttgtgagagtgagcacaggtgtggtcctgctctcccactgagttgcctaagagggccagacactcacttggttgggtaggcaggggccctgggaggtgttagtttgcacacatgaaggtggaccctcctactgtctcctgttactatcaatacggtgttacttttggctcattagattgagaaagtattgaggtctttgaggcttgttaacacagttatcaccagatatttattggtaatgtggaggagctacaggcacccttagaggaacagacctgcacctatgcacctgagtgcaatgcgctggtgttgggtgcagttagtgactgtgccctgggagcagctactgcatgggcacatggtctaagaataggtcccattagaccctggtcttgtcagagaggcttgttctaggtctgcgtgagaagcaagctgtttcaagtttcatcagcctttaaaggtttttaggcttttcttttcttgtcttttccgttcttttttcttacagacttctgcaccggtttctgagtctcgccctccttccccatgttcccctttcatttgtatcctggtctggtgctttcctgcatcagctcagggagtaagccggggtgggggaaatcatctaaaattgatctcaataactcagttgagtaaagttaaatttattctatttatatttttaagacgagatactgtccttccacatttagaagcagcactaggttccagagtagagaaaatcccacctccacagatcagaaatgtgcgtctgttaaagttgttttcctcagaggacatttcaaaagtaacacatggcttctattgacctcattttcttccacctgagaaatgatgttgaactgggcctgcgtcagagagccatggtgcctctatgacagtcaagcagagaattcccacttaacactatgggcttcagtgctgatgagtttcgcattgggcaatgggaccctgacagaaatctaaggcagcgcccagagcgtgctgtcagtgctctccagtttgggctggcgtttaagatgaggtaaatgttgtggaaatatacaaagaaactccagtatgagggaaaacgtcctctttttggcaccaggttccctttcttcctcttgccttctctgccatttctgtcacgtaattcagccatcagtgttcatgtgagtccagctgtgtaggactcaaggctgtccgtgtgttccacaggctcagcttcctgtttgctggccttgatgatagtgtcatcacttcagatgtaggcaccggctgcagcccagctccaagccccttgagtgtggtggggccagtcagttggacagaggagaacgtttctcatggtcatggtgagcatctctttgttctttgaggatctgaaagctgctgtctgtacttcggaatccagaactaatacagcctatggcagcagggacaaactcaattaacttagtttcttgtggtatatcagcaagtggagtggacttctcctgggccactcgaccagtgggttcacggacggtgctggcatcctgtgtgtctgtgagtaggtggcatccaagtcctttcttagttttttaagtcctttgtccactgagagccatgcatgggttttgtgtgtcccttttttggggggcacacccctggagaagcttctttgaaaggcgtggtggtggtggggatcagtgtccccagtgtccccagtatcagagggtcaggtggctttgcttgagcacatagatgtggaggttggcaataatctaccctgaagcctctatctccccgtctgtgtgtcccgcagggcgtctgtggaggtgtccaggccttcgtcctttgtatgttgccttcctttttccttctctggagacttcagatgtgttgaattgaaatttgtcttttcccgcttgtttttctagactcatctaatgttaaccgtgtgtgtgtgtgtgtgtgtgtgtgtgtgtgtgtgtgtgtgtgtggttggcaggtgagtgggtattttctttgctaatgtcacatcatagtttcctttgtgacccttggaagttttattggttaaccctgggttaattaactccttactttcacattatcccccactcgtcacctgtttatctttccccctatttcttggcaggtattgttaatctcccctccgtcctgttaggggctgtatttacttttttctttttcacagtttcactatgtatagacttgtttttcttcacaaacttttctgatatcatcatttcaggaagacagcagttcatctgcctttacacagctttagaaaccggtgactgtaaggttctactttcaaagagaaagttctgtgtccttggttgaccagttgccctggtggactagatgacggagtgggagttgagccattttctttgaggcccctcttgtgttgtctgcatgcttctcccactaaggtatccattgctctcagagaggggggtctgctgtgtccctccccgccacactgtttccatggctcctctcctgctggccctccagatggcagtcctcctctgcctgaggtgaggacagggaagggggctctgtgttcctcattgcaggtctttctgtccagctcccaccaccctgattcctgagtctttggggtttcgtgctttaattagcttgcttcttatcctctcacctagaacaaattaaaacattaattatcgcttgtctctctgcttttctccttccaaaaattctttgacctcttgcctgctgctaccccagctcatgttttctctgccctcacagatttagacttttaccttttcattgttccttccgtgggggtccatacatagttataaacaggagccttgatctgtttatggaaacctgtagagacatttttagtaagagcttctcttacaaactgttgtctacatgtttgggtttcagtgtgccacctggtaacactctggctccagaagtgtgtgcattaagaccagaggggacttcaggagataagtatctgcggggtcgattgttggcagggccctggcctgaggagctgtgtgaggtggggctgtctctgtgtagattagccaggagaaagttcgtggtactgaggcagtgctttcagagtgattgctccctcgggtgtgcagggtagggctgggaggacagcctctaggccagtgggttctctgcccatccacaggaggccaggctagggttgctgagtgcctgtgaggggggctgctgtgagggatggtgggaagggacagttttaaggtgaactgggacaagggttagcagagcagcaccacaggaaggcaagggccacaggctgggcccagaggatactctctgtggtgggagtagaccctcagggctgcagctctgcctgctgcctgctgatgctctccctgatgctggaagctgcaggctccttgattgaagccctgccttgctggtctccacctactcctattggaagataatcatgttttcataattgatactaacaatctaacagatatggctagcctcactcctcagagaaagacagaatggcatgtatcacaggcaaaaggtttttttttttttttttttttactaaagtttgtgtttaatgcaatttttagcaatagagaacagaatggaaaaagaaccttctgattcatacttattaagcaacccagaaaataagttaactgtagtagggcaatcaggaattttatctacaggcacagcttcatagtatctgtatgtgtggcccagtgccaagaccagtgtgaaactaaaaacaacaacagcaaactgttagagcaattataacaagtcaactttgtatccttctgtgtcaggaatgaaaaataaagagtccagcttccccggcctgccggcctgccggccagtatttagcattcctgctgctgtttacagagctttgcatatggtctttgaaaccctgcgtgctctttcagcgtgaaccatctactcactcttatcagctttcaagatgctgtctctcacagctctgccactgttagagcaggtccggaatcaagcagggagctgggaaagagctccgctgcagagctcggctgcagaccgccatcctggctggaggttgctaagcttctgtgtacattcctggtgccctcctggtggcctgatccttaggcctccttaagttaaaaatactgggtgtgtgtggtcttggcagctggcacgaggccaggctttttatatcctgctctggcctgggaatggagctcagcagagggggtgcacagtgtggggaggccctgctgcctggctgttctggttttgttgttctaaggaagagacagctgatgctggccctccacgcgcatctttcttttggtctgatgtttgttagagtagccatagagagccaactttagagtttaatttcctttcccctttgaagcctgttataccatctgttagagagaaacttctatgcctaactacttatactttaactaattaattgggcactgggttcctggacatatttattaaatgtcaacaacttgggacatttagtctttgtttttagagttttatgtccagtaggatttttcttaaactatgtccagaatatcctcgggagtgtgcacactgctttacattttttgttatgaattattgattagattgttctgaaggtatccatttgtttcttcctccccacagcagcacctaggaagctgttttctgtctccctccctcttctgggtgctgttttacatactagcatgccagggctaaaggaggcaaggcagactcatcgcctgcttgtgctattagacatccgtacagtgaggaacagtgctgtggagtcttcattgtgaatgctgttcaggctgttccctgcagtatgtgggtcaatgggtggcccagttcaagacctggggcacttcagaagaagtgaggtgtctgcccctggagaggtgtcttctgggagaggcaagcatccatgtgtgtcttgtggggagggagtggctaaagcgcttatggcgtatgattgataagccgattgtcacagtcgggtggaccccaaggaagggacaagcatgtcattggccctgacagtgattgacaaggggaggcaattcacgtgctttctcagatgaagatgcactaaagcgttcttttgcactgttcttcccaaggcctcacggccacatgccttgtgacattcttgggatgtttttacacaaagtgaggtcctttgcaattttaagtattctttacatttaatttatgtttgtgtgtgtcctgagtgtggtgcaggcatgtcagtgtgtgggcacatggaggcctctgttggccttgttgccttgagacagggtctgtcagcaaacaggtgcacattactttctctaggctgcctggccaccaaatctctaggatcttccagtctctgcccccagtgctggggtcacaggtgagcagagctgtttctcacttttcttgtagatgctggggatttgaacttgggtctttatgttggccatagcaggtagtcacctcctggaattgaagactattttctggcagactttaatgggtagccctggctatggccctgcatggcagactcgagcttgccccacttcttagcccatgcgggaaagatcctgctcgttcgttctgaagttggcccagtgcacagaatcagctctcactaggagcacttacttgcttccttctttggaaatggaaactgttgggcagaggggtggacatggcgagggtgtttgagcacactatagcagaccgttttggcctggccaatgtgaatcgatgtgtttttattagagctctttggctgatcttggactgtagcattctcacgttggactgaacgttaacaaaatatggatgcttttcttccttgggatcggctgctaaatgtaaggggctttgtggatcagtgctgcgatctcttcatttgtagggtgggagtccactaagatgggaacttatgtggaggggtttgctgaggttctgagtcagagccctttggaaggcatgttggaataggccatgtaggtggggagagcctcgaactctacctttgctggggatggaggacacttgtgctcttttctctccttatctccccgcccacccgttttaaagtaattctgtaaaatatataagaatgtaactgcttaatgcaaaagtaagaccccatttttcagagataaagtaagtgtgtgtgtgtatgtatgtgtgtagccgtgaataacacagcacagtgctgtgcccctgtgctgtggtttcctccctggctagtgcacctgtgtgtttgctgtgtgctcctctctcccattttgtgtaggctgcacggcaggcctttgtgtggattgctgtgttcaggccagcatgaggggactgatttcactgctgctacaggaggtggtggaggagagctggcagctttaaggatcacgagctcttcctttaagggaatttcctagaagtgaaaagaggccacctagcccatgatcagaaaacaatcaaagcagaagaatggagcatccgccctcctgttgcttttaaaaagtgttctttcctgggtcacaggaaagtgccactggcagcaagtgacctcacttgggggcttcctgggactgcttagcttgggagtggaatatcttgtgtggtctcctgttttccatttggcctttgatctgtctgccttcactcagaaagtttaaaatttacctgtattttgtaatacccaattcatagactataaacatagcctgtgtgttctgagcatgttttctctgttttgtaatctgtgctgttgactgtaaatcttaagacactccttagaggttattctttgcctgcttttggatctgtagtgaaaattaaaggtactttaaagtccagaaagtggatgatgtccactggtcagtaattagtgaactcggtaaagggcagctgctcagagaagtaggagagtctgtggtggctgggcatgtaccagggcagctgtgaagtaacgtggcaggtggctagtgagaattctgtcgttctccttacagtacatctaaaagctcaataactgttgggtgggagtagatgagtgttgagcatttgtggagagtgtacatggtccagagctctatcaccagcatgtaaaaaccaaagcaaaagtcaggcatgctggtgcacacctctgatcctggcactcaggaggcacaggcaggcttatctctgagttcaaggccagcctggtctacaaagtgagttccaatacagccagggctacacagagaaaccatcttcaaaaacaagagccaccaccaccaaaagccaaagcaaaataaaaaagaatataaatgtactagcatgaagcagcttccgttgtgattggagtaagtgcagagctaggatgcactgcacgggaggcttcaggctggcgtggaaggacttagcagcctgtgtctgtttcataatctttttccagtggaaacttaacatttaccaggatgaccttttaaaagtcacggcctgcctcattcatcgtccctctttgaaaccatgtttactctaaaagttgaaaggacattgtcttaagtttttctttccataggacatgtgctggtttgttgtttttttctgtaaaatgcctatataatataagagagtaacaaagcacaaaggctcttctgtaacctcccattggttagccactgaacaaagcttcagaactttgctcatgaacaggactgggctttgccttatgggtgtctgtgtgttcatagtgcacagtgccatgttagaataggctccggcaccctgcgctgttcagtaaaacatctatgaggcaaagaaaccaataaagagaagaatcagtccctcaggggtctgtgtgtacaagtctcgtggtgctggggctgtttgtggtactcgtgaggctgagctctggaatctcgaactgactctgaggacagagaaagaaacctgtggttatttatacagggtccacgtgctccttgtattcaagcctctagctgctcttggcttctgacacaactctctttaattgtgtatttgggaaattacaacaaaaaccaacattttaaaagaagaacttccctccgatggcgaatcagactggtcgcggctctggatcagatttttaagggctccctttggagctgtccagttattttgctatttcagactggcttgcctgtgacattgtagctcttaagataatttagagctgtaggacgttgagtgggtttgaaccatgctgtataatgtaatatggaattttgtaacactgttaaaattctttcctttgcattcagatgactaagtacagtcaacggcgttggcaccgttaccttctgtaggtatttactggctgagtctttctctatagaaagcagagatcatggagaagccagtgcatgccagagctgatttgcttcttaaaagattccaggcctgaagatgaccagctagacagcctttagcagaacggcctggttctggtggagaatgggcccctgtggatggtgtttggcttgcagtggccttggaggctctggtgtgattatctcgatgcgaggcggtgtagaaaacaggtagtttcagtttcgtaaatctgtgttttcaagcagatagggactttgaatcagagtgctgtgttcaaatcacggaagccttcctgactcttgtctctgctttcaaggccgttttaactcaaaagtgattgagagccagaaaatttgacctccattaacacgcacggcgttgtcataagcacaatccttctgtgactacacctttatcccaaccagagggtgtgatttccctccccctgatcccgacctttaccagcagtatatatttttctgcagctgaccacaaggaaacatgtcgggactaactcaggataacttggaagattaaattatgatttaattagaacattctactctggccctgttaataaccaatggcttgtattctaatttcctgtgtccctgagctatgctattttagatcttgagcttattcaaggctgtacctagataacttttttctttttaatactcagggtttctttcccactcatttatgttagagaggaagaggtgtttatcgaacaagtagttttgagaggagacccaaagccttggtgagctgtggtgaggaacagcaggaagctgctgaagcccacagttgagcttccacttcggccttctgtggtgcaagtgtggatgtatctgactgttgatcggcgagcacacttggggttcccggtctcatgtatgacacattaccttgtgccatgcccttttgaaccttcagacataactatacctcagagacagagtctgcaagatgagctggagagcagtgattgcctcagtaggttctgtagagggttaaatgagatgttacctgtgagtaatgttagaactcatggaaaaactagattttgtgtttgtaagcgataaatatttttacaaaatccaactgtactttagttgtgaattgtggtgttaacagtgtgtgtggcaaaccaaagctagctggctcatgctcggtttccttcttcctctttaggctgggcacagcacacagcacagtgctgggcaaaatgggctgggaacagggtttagtttctctctctctctctctctctctctctctcgacttgtacatgaggatttctttttgaattaagaaaattaagactctattgaggcaccttaagaagtgttgggtgctatgggaggcaggtgggagtcggaacatgggatccctgcctgtttctattcttgcaggccccaggtctcctaggcttactggatttcttctcacaaagcacgcgacttcagtcccccaccctccagcattatctcaggactgctcactgatgcctgaaggcctgttgagatgagcgagtgaggccagcccatttggatcctggcagtccagttgcagaggactatctgcctctggatatcagctagcatgccactacaacccattggttgtgtctggatatatagggtatagtagagacagtaagtgcttagagaagttttattatatggagagttcctttgtaaagtgttgaagcatattcatggctgttatcaccgtaaattactctaagcagcgtgcccatcagaataagtgaccagacatattaggctgcaacatggatgagctcttatggttgtgttatcttgttaaatttccataagtttctagaaaattttgtctgtattcattatatgtctgtggtaagttcagggtgaatatttttatataatgctgtatgttctgttaaaggcccaacctaagttacgataatgtcatggtggtgtgtaagttaacatgaagaaacaaaaaggtacatttcaaattgtgaattgtgttttctttcataagaaaacgttctagtattgccttaatgagtggattgtttttgatttttttcaaaagcttgaggtggtcaaggatgtgcaggatgggcatcagctccagaactgctgctctgtgtaagcagatgcaggctcaggactccagggggcgggtgtgccatggagaatggacagggctagggctgtgcgaggagttcagtgggacctgttctcgtttatgtcttctccatgatagaggggggtgtgtccactttattgttagcttgcttaggttttgcaaaattccgtattttagggcagagtttccgatataagttatataaaagaatcatattcttaaggtaaaaggttaataacaagccgagacttttgctaactgtatgaagagtggttaaagtagtgacaggttgctcttctcagactgcctcagggacgtgaatgaaccccaacttcaacataaatatttacccgcctaagatcacagatagagaggagaacattgacttgcatcccaggagtgagctgtggagtagaggatctagctggctgtctgcttttgatggcagagtagggtgacagattgagttctgtaagtgcctgctgttgacatatgtcatagcaattgcagtgctcacatggcctggctgtgggttcttgggcaatgagctctggaggtggtctggtccccaggttgctgtagggttatggtgtggcccgtgtgctgctgtcttagaacagcacgcacatgtatgatttgcgcactcgtagcataccagccattcctccattccatgtgcctgtgagcaaacacaactccactgatgcctgagcctgctcacaccgtgtctgtgacaaccatactgcctgcagttttcagttccatgggtgagcgcaatcacccccctcatagccataatgaccacagttatgtgcagcaactcattccgcttcctagcagttcagtgagccatgtgtcgctgttatctccctttacagatagataatgggacaagagatggaatagcttcccaagcatacctgaccccacttagcatggctgcaggccctgttacctcaccacagtcctctgcctgtccagcatccagtgttccttcctggtctcataggagcacgtatctgtctcattgcttttatgatgcatgtttgcagtatgtgtgccattacctgtttattgtattgtgttaatgcacaaaaagctgggtggtgtcagtgggagtggatagtggaactcattgcccttactgatcagtcttattttgttaaacaaaatgtaaggggggatctacaagagaaatggccgatgcagcttgactagcaagcggcagagggcgtagtgtctgaggttgggataagtgggatacccctcattccctccaagatctgggtctacagagcctgtgactgtgtgtcacacagccctgtggcacctgtgattgagggacactttcactgtgtgacctgagcttgagtgaagtatcactgcgcacagcatcagctcagtaaagattttgtgctttctgtgctttaagtcagtaatctaagttgaaccttctagaaagaaagccctgtttgggtattgggagcgccaccattttctagatgtggaaactgaggcttggactaaggggaattcagctttctggtgacacatcaatgctctcctgtggattttgagaatgtcagggcctggttcctcacgattgatctcagacaccaggcatgggcttcccggggaggtaggacaagggtccagcggctagacacagaagctctggtatgttcaagaccacgcttgtagcatggggttccctggagccatcttccccagaaacatcagccgatcccactgctaatgcagccttctccttcccctccatcagaaggggtctcgtgtgtcccaggctggcctcaaactcacgctgtggccaaggatgactttgaagtggtatcccaggcaagctctgcagtttctggttggagctcccaggctaaccacgggatggaggctgtttctgaagtttctgtttgaattgaaacttctctatggagctggatggaaggctctggccccttcttgaagctgctactgctcttctggtgtgcgcagagatgaaggggcacggtgccctcaatcgcagcctggtagtagctagtgctcctttgaggtggaagggagccacatgtctggtgttttcccgtctgttatcctgtaagcttttgctttaggtggtgtgtgatactctgttgaatgccctgggcacagcctccccttcttgtttgtagggatgcaggagtcagagcggagagaaggctgcttcccgtatgttagcatccctcttcagtgacttgcagaaggcgagtaagaggttttggttctctttgtgaatgttccagtgttcactggcattctgtagtgtaaatgtgcaaagggaactgttaaaaatgtcattattttataattcacagcagcatttgctatgcagcaatgcttaccagcagcttctctgtgttaaacgaaactaaagcatttccagatcaaacctgtaggctgcaaagcatgtgattccttcccagccagtcacatgtgcctgaagttagcatttgctccctgcagtttggagagggcagaacgctgaggtggaaagctgccactgccatgtttcattcagacccccacactcttgtctgctcacacaaccacaggagggttgttcagccatttggtctccaagggaaacaaggacgggcaggagggaaggagggaatccacagaggagcatgaagacagcacctacatttatgtatgggttttccgaagcagcatgggccttctgaaactcttagctctgcgcagatttcattttctaaagttgttgcgatatagattaatgatttgttagttctttccagttttatctggtgttcagaacttatcgcatgtaatgttggaaggactctggatcccttgcagaattaattttttaaaaggacttatttatttattatatgagtacactgtagctgtcttcagacaccccagaagagggcatccgatctcattacagatggttgtgagccaccatgtggttgctgggatttgaactcaggacctctggaagaatagtcagtgctcttatccgctgagccatctctgcaggccccagaattaattttttaacgttgtattttttgagctttaaacattgatctgttttgattttggtggagacgaatggccacagtaggatttggatgtgacatatggtgtatggtgcatggtgggagcctgctagtgtgacctgccggtaatttccaatagtcagaaacgagagactgtttgaaggtagaacttctgccaatggaaaggtagaggcatcaagacagagaaaggctcactacagccctcaggatgagtctgattttcctgctcactgcttatctaacaggcaccacaccaagctgcagagtgctgagcctttcattgtgttggggttgttatagagaagaaaggggtctgagtgttcagtctgcaaagtcctccttctctctatgcactggttctcaggaccattcaccagtgtttagttaagacgtagatgattggcaaccgaggagaatgttccagacttttagaggatcttataaacagaagtctttttttcctggcacttcatttccagcctgaggaagtagatctttctggaaacagcttttgatctcttaaagtaccctgttttgtgccagttacttgcatcctatacagctagtatccacaacctaacaaaaactcagagaagccaggtcaagagaaccatgctgcggccagggcatccattgagggataccctgctgccacagaaggctgagtggtcaggccctgggaacggtgggacgagtctgctttccattgctgtaggaagtatttaaaagagggaaaggcacacggtggcttacagcttggctagttctagtcatgaaggattggcttattgttttagggctgtggcaaggcagtgcacaacatgggccacatagtccaggaagacactcacgtcacggtagccaggaatcaaagaggagtatgtgtatgtgtgtgtgtgtgtgtgtatctttgtgtgttcatgtgtataagtcaccaactcacagcagtagatgacagataaacaggactctgtctctctctctgtgtgtctctctgtgtctctctgtctctctctctgtctctctctgtatgcatttaagaggcaggcattatccttctagtggacatggtctgcacattattttgtagccgtttatgcatgtgttttgttgatgaagaatcccatggagactatggtgtgggtttggattaggaaagtctggagataatgtatgtaaatgctaatgtctttagactgtttctgaaggatcctcatgttgtcctgtctaagaagacacccttgacacactttccgattctgtctgtctgtctgtctgtctgtctgtgtatatgttatgtgcatgtttgtgtttgtatgggcatgagtgggctacagtgtgtgtgtgagggttaactgggagttaattctctccctctactatgtgggtcttgggctgaaactcaggttggtggttggtgggtttagtatttgctgctgctcctgtccgtcatgtcagcctgagttcaggtctgttgtgcggcaccagttatttttagagcacttgaggactccatctgggaagtgaggccctcagagctagaaccttaggggaagaaggtaggtcttggtggcagttctgtggggcatgagtcactgaagaataatccacagtaatcctgttcgttctgtattctaaaggactgcagtttcttaacagagcttcttcaaagcgttcacactagataggacgtgggtttggtttggtttttggtgttttttttaatgatgcagtgtttgtgtgtggtgtgtgtgtgtgtgtgtgtgtgtgtgtgtgtgtgtgattggtgtgtgtgtgattggtatgcgtgtggtatgtgtatatatgtgtatggtgtgtgtgtgtggtgtatggggtgtgtgtatactatatgtgtgtggtaatatgtgtgataagtgtgtggtgtgtgtatatggtatgtgtatatatgtgtatggtgtgtgtatatgtgtgtggtaatttatatatatatatgtatcctgtggtaatatgtgtgttgtgtatgctatgtgtatatgattgtggggggagtatgtagtgagtgtgaggtgtgtatgtgtatggtatatatatatatgatggtatgtggttgtgtgtgtttatgcgtctctatctgtatctcaagaagtcttttagcgtggtaacctcagagccttggtagaatccactgtaaaactgcaggtcgggtctggaggaggagggatgccaagccctgtggggtcttagtagcctgctatctgtgtttctttaaattgttctttaagtaactagaggactattcgatactcacaggtgatttgttttatttattttttttcatcttcaagtgagaatgaaaaattatggctaaataagacagtcagtcactgaaaatggcttataaaccagcagatctctctcatagcagccttctttgctttaagtaattggataggcttgcaaggtacagtgggaattgtagtttccaacttctttgtattctgaaaatgagtaattcctcaggcctctgaggtagaaaaggagagtatgtgctctgataaattgttatcttgtttttcaggcgcatgctttgagcagcacaaagccgccagtcttcagtgtctcccaggggctctgagcttggtcttaagtgatggtagcttataaagcatggcgctgtgctactttgactttgaccctagctttcctctcctgcagcaatccagaatctgttttatcataattttgaaaagtttttatttataccaaggtgatttgtgaaaatggtaagtgaggttgatggttctgtagtgctggctagtttatgtcagcttgaccccagtcagtggagcagagggagcctgtagagaatgtctccattttctcctatagactggcctttatgatagttctttatttagtgattaatggtgacggttgcagtgcattgtgggtgggcccatgcctggactggtggtcctgggttctataagagagcaagctgagcaagccagtgaaagcaagccagtaaggaacatccctccagggcctctgcatcagctggtgcctcccagatccctgccctttgtgagttcctgtcctgacttcctttagtgattgatgaacagcaatgccgaaggccaaataaaccttttgctccccaacttgcttttttgtcagtgtttcatctcagctaaagaaaccctaagcaggacatgagctgtggccatcagagatcgtaatcactgtcctccctcctttggcccctcccctgtacgagccctttcaacctctcgctgagtcttctggtaagtcttccatctttgaggtacaccttgttctgttaccttcagcttacatgctgtgtcttgcttttccctctgggtgaaagccgcttagcattgctttccacttgaggccttgctcttctggttctctccgcacacactgatgctaagttggaattgaccgcggctgtgtttccgatgttcagactgggtaaaagaagcagaaacaagcaatagcttattattattagcttacccacattgtctttggttttcagcagagagtggctggcctgcattccctttgcagagtgtactgccctacagtgtgctgtgctgtactttgggtctgctgggtcagctgtcatttatgttccacaggtctctcttcttgctctttgtggcttatccttggattgacatttgctgtcatctcttgaactgggctgggtcctttgtagctgttctgtgtccttaggaccatcttctagtgggtccctcagaaatggaacagagaagtaaatccaaggtcttgcgtgttggagaattatctttattttaccttcatatgcaaattacagaatgactgagaagagaattttggaagtcacattccatgaacatgtgtgtgtatacatgtgtgtacatatatgtgcatatacttacatatatgtgcacatttatacacacgttattctgaagccaattgatgcacacctacatacacacacatatgattacatttttagatacaggaattcactatctagccactgctgacctggaacatgctttgtagcaggattagatttgtctctgccacccaagggctggcattaaaggtgtgtaccaccatgccagcattcggaagtggtcctcaccatctctactggctagttttgtatcaacttgacacagctggagttatcacagagaaaggagcttcagttgaggaaatgcctccatgagatccaactgtaaggcattttctcaattagtgatcaagggggaaaggccccttgtgggtggtgccatctctgggctggtagtcttggttctgtaagagagcaggctgagcaagccagaagaagcaagccagtaaagaacatccctctatggcctctgcatcagctcctgcttcctgacctgcttgagttccagtcctgacttccttggtgatgaacagcaatgtggaagtgtaagctgaataaaccctttcctccccaacttgcttcttggtcatgatgtttgtgcaggaatagaaaccctgactaagacaccatcttaaccacttatgttgtcctgggatctgaagccatttctggttttgctcctaaactttgctatttctctgtgcctccccacccccacaatggtgtagcttctgacttcctggtgtccttgagctccatctcagcctggccgcttctttggccatgcaccctgactctgagtcacacaaacaccctgggactctttcatctccaacgttatctctacccttcattattccatgttttgtagtctcttcccttactgttcttgttaggatgtcgactcagtgtgctccgtggggccctagtgagcaccagcacccctcagcctcagcctgctgtgtagctgttgcttctggtttggggcttagggctatttctcttctgtttttctttttttttttttttttttttccctcttggttaccctttgtagatgactcccagttccagcattatatatttaatttacaaaagctctttttcatctcctcaaaccttccctttcttatccttaatttctttgttgttttgtttgttttaatacaatcctgttcttatttcagaaaaccatttttctctgaaacataattgactgtgctctgttttacacagtttcattttcttctattatgtctctttttaggttttttttttttgttttgttttgttttttaaattctattttatgttaggtactttcttaaactaccaagaaatctcaggttgtctgagtttctgaggagagattgggttgctgggcattggttgccgattgtgtggagaggggatggaagttggtccctcctaagtttgcatttatatctatctgttctgttggtttggcctggtgttaacccaggcagaggatgctggcatgctcttaacagagaggatcttagcatccagctgctgctgctggtgggttccagcagtgcttctggggcctccgcttagccatcttacaggagtaagactggcttcttccaggatgagggaggacaagctgaacttcatgggagaggatcttcttggtcgttgcttcttcctcccatgtttaggctgtagatccctttcgcagcccctcgcatctgtgcccgccagctgccgctctgcccttgcctgtatccagggccatcaaattcctgtgccctgccagcctttctggtccactgcatgtaagcagctcaggtagtcactgtctgtccgtctgtttatggcttccacattttgctgcagttgttcctgtactcaggagtttgttagaagagcagacagagcgggcaaccagaagcaagcagtattgccattttgtttaggagggaatgactctagatgtgagcttgaacctgctaccttcctgcagatgtctctgtaggttataaatgtggaagtcagaaaggtagaagtttggcttcttctgtaccttcaggtctgcttggggttttctcctgctccgtacagacttttttaacttctgtgaatatgtacacaattgtgggtgacaatctgtccaataaacagaatttttacagacattaaatataatcaacagcctcaaagagtcatgtatattctgttttttgttgttgttgttttttgcctccccccccnnnnnnnnnnnnnnnnnnnnnnnnnnnnnnnnnnnnnnnnnnnnnnnnnnnnnnnnnnnnnnnnnnnnnnnnnnnnnnnnnnnnnnnnnnnnnnnnnnnnnnnnnnnnnnnnnnnnnnnnnnnnnnnnnnnnnnnnnnnnnnnnnnnnnnnnnnnnnnnnnnnnnnnnnnnnnnnnnnnnnnnnnnnnnnnnnnnnnnnnnnnnnnnnnnnnnnnnnnnnnnnnnnnnnnnnnnnnnnnnnnnnnnnnnnnnnnnnnnnnnnnnnnnnnnnnnnnnnnnnnnnnnnnnnnnnnnnnnnnnnnnnnnnnnnnnnnnnnnnnnnnnnnnnnnnnnnnnnnnnnnnnnnnnnnnnnnnnnnnnnnnnnnnnnnnnnnnnnnnnnnnnnnnnnnnnnnnnnnnnnnnnnnnnnnnnnnnnnnnnnnnnnnnnnnnnnnnnnnnnnnnnnnnnnnnnnnnnnnnnnnnnnnnnnnnnnnnnnnnnnnnnnnnnnnnnnnnnnnnnnnnnnnnnnnnnnnnnnnnnnnnnnnnnnnnnnnnnnnnnnnnnnnnnnnnnnnnnnnnnnnnnnnnnnnnnnnnnnnnnnnnnnnnnnnnnnnnnnnnnnnnnnnnnnnnnnnnnnnnnnnnnnnnnnnnnnnnnnnnnnnnnnnnnnnnnnnnnnnnnnnnnnnnnnnnnnnnnnnnnnnnnnnnnnnnnnnnnnnnnnnnnnnnnnnnnnnnnnnnnnnnnnnnnnnnnnnnnnnnnnnnnnnnnnnnnnnnnnnnnnnnnnnnnnnnnnnnnnnnnnnnnntgtgtgatttcctaaccagctgcatcagaaagtacttgagtagtacccaagtagggtcatgatcagaaagacatgtgatcttttttccactttgtttgtatgtggaaatcattgcagatggagcggctggtaacccacagacatttattctttcaatgtggtagtccaagaccaatgtgctgccaggacctgtttcctgatgcgtggcccctgctttctgcatgtgcacctggaagacagggggccacctgggtctgaagtctcatgtaaaaggtctctccttaaagctgactatctaattactccccaaagggtgagctcctgccacctcactgtggccacgaggggtagattgccagtgtaagcattgtggagggatacttaagacaaaacttaatagtgaattagttatttttgtacaaagccacccagaactatatatgatagctctttagatatttaaaaagctgggcttagtgtcacacacctttcatcccagcactcagaagccagagagataggtgcatctctgtgagtttgaggccatcctgggctacatagtgttccagggctgcttgagctacataggactgtgtctctgaggggtatgaggagattaaaagaaaagatttaaagatgaattttggttatagttttaatgattcttgtggtattttctattatatcagtgtggaataggaagattttaaagaattcagctacattgttctaaaaaggtgtcagtctcagaatagcaatcatggtgatacacatttttaaggaagtcatagcttgtaaaaattactcattgaaaagtcttccttaaaatatctgtttccattcaggatgctcatttcttttaaattgacattcattgtaggaaatatttgtatgttttaaaaatgagtttaaagacttgcaactttgtgtcaaaggccatattctcatagtaactttagaaaatttccttaatgatacttcctgtacaaccaagaaataaaacaaaacacaaacaaacaacaagccccaaatgttgcccgacattcgcaggccttgctcaggaagagggccactcttcttttgttgcttcaggctctgcctgtcagaagggaggaataattatggtttttttttctttcttttttagattaatttgtacatttatgtacattaaagtgctcagtgtaatttactatatttgccttataaatattggcagaattccatccttaatgagtttgtaggtcagtaatccaaataaacctaatttactgaaaacagtgagctaagggcctctatagttcatattgatctggctgtctgaggggttggctggacatggggaccgtgtctactctgcttttctcactaatatcagacttgacggtatgtgagcagaagtccaccaagaattaatgacagataggatatgaagagatacatttgtcaaaagtgaactttaaaatggattccttaatagagagtcttagaaacaaaacaaaaataaatgtgacattatcttgtgggaaaaattagttctgagaaagttgtagagtctcatttagcaactttagacacctgttgaaaatattttaagaatatcacttctataacatttccgtgtttcttgttataaaacataacaactgacagctatgactattactagctctgttgtgaatggtgcagtaagctgtgaggctggagcagggccagccatggataaggatgcccatgcccgtcgttcccagagggtcaccatccctgtgggagtgttacccatgcttgctctcgtctacctaggcaattctagatctaactcctggattatggtgtccttgaagaaggacagctggtggctagaatgcccctactggcctggaccccattctctcatgtgacagcagacaaatctggggagagctttgtgcattttggagaacaccatccttcctgcttgtgccagcagtgcccttttgtagtgctgcgaagctcagagccctactttgggcttgagggctgaggcagggttcgggcacagcttcctgtgagatggctgtgtatggcagacccagcctaacgcggaatgcaaagcaccctggctccagaggctgagcatacctgaatatacccttactctagggcttggggtagcagatatagtagcacattaattaactgaggtaaagctcagtctctgtctttgatctcgatagcttacatttttcttgtgctttctagctttatttataagagcttgtttgaactaagtcttgtcaaagatcaatctgtgtggtattttagaatccatggaacatgaattctcaatctgccaggaaaatagaaagcccttgaaaatcatatttaacatggggcatacatcacatggataggtgtataagaattgtgctgtgtttgaacataatctgtatgctaattttttaaagtattatgttggactctggagcaaatcagaaatagtaggttttactaaatctcattctcttgtagccatccttagtaatgattctccttcccctgactggcaattttctttatgttttatagttgagatttccattcttgtattttaatatgtggaacctttgggtttctaatacactagaaatgcctttatagtttatctcaataaatttgatgactagaaagtaagtgagccctctacccttttgataatctgcaagaagaaagacgacttgctaacagagatgtaccagcagggctgaatctaataactttcctggcttcgtgtttattgtgtacaaaggtggtgacattttgcaggtcaggaataccatagcttattttcatgtcttgttctttgcaatacctagctagcccggtgccagacaggccataggtggcggattagagaagggcttgctaagggaacacacggagcaaccccccagcaaacgccacagagggttctgtttacctctgtcgcgggcagggtggaaagcagtctcgcacagtgcttttgaatgttataaccataataacaaggttccccttttttctctgtccttagttttagaaggtactgagactgagtaaacaaccctctggatgtccaccgtgattttctgatgtctgtgatcctgaagtgtgtggtggtaggaaggagtgctggggtagactctggacttcagccttggcccctcagatctgtgtcctttttgttgagcagagcatgaatgttaaatatgttaaagcaagccgctgggacctggtgtttggtacatcatcacatcctgtctccccatcttccttgtcatcctttttcaattctcactgctcagttttaggcattgattttcagtctgtattgtttagtgacttggtagacattcatcagtcatttccctccttcaggtccgactagggcagagagaggcatgaggtttaagcacagtgctgagggataaagctgctttatcccctcgcgcttcagcctggggacactgatgtcacccgatggtcacatgcagcttttaccagggattgcctcatgcagcctgagctggcaggcctcctggctccaggcctgtgcatgaagcctttctctcctcttcttcctctcacccaccattcttcccaagacaccatgtaggctgagcctgtgtgtgccatgttgggcaggctgttcttaccgacttggaagctttaactgggagcagggagcttgcctttccctttaccctggtaccttgaaaagtgtctttcataggatggtgctattgggtatgggctctgtgggtcaagcacaaatcaaacaaaatattaatacacttttgtttgttatattaaaagcagacagtggtctgacagaaagtctgcgtatgaatactgcattgaattccacgtacatgatgtacagaccaatgaaaaatgttaaattttcaggtttgattgtttcttccaaaagagattttatagtactagtagtaagaacaataacaacaacaagtccttagaattcagttaattttttttctgtatatattcaaatttcagcatttagtggtgttgaacagaagatgggaaacattgaaatgtgccaggaggccaggtcatgcacaaattttgatttccatacgaagctaattgtagcttaaagactgcactgccattgagtgggctccgctgtcactacagtgtacaggaaggaatccttcgacgtaggatattgatgctttgtgaaatcaaagtaggccaaagggagatgaactaatgctagtctctactacattctaaacatgtggaggagacgttaggatttctataaaaatcactgtgagagttagtgacctatgaccaccggcagggcccagagctaagggacaatgaggctgagcatgggaggatatgcgatggagcatgggaggatatgcggtgggaggatatgcgatggagcatgggaggatatgggatgcagatgctgtgatttggtgtggtctgtgtctttgtggtctgcttgcgctttagagctgtggcacacaatgaattgtctgccacttggtatgttcaggactttgatctgaggcgccttctctactgaaaggagagcctgggttctgggtctctggatgcctctgggggtccgggttccttagttccacctgtctcccagcctcaggcctgcactatggaaccctgtgtagttttgtagattaaaaatacagggacaggctgctggtaacttgttctagtgtgacaactcatgcaagaacctcttctgtgtggcagagcaccaccctgctgtcctggactctgacatcaccttataagggacccttgacctctacattttgcctctgtttgtgacttgatatccctcatctctttcttgtctttttgatgaaactttgactacttcacaaagctcagctgcattctgctttgtagtcctagtctctttccagaaggtctgcagtatcatgttgtgttgcatgctgggaagggaaacatgcatcttaaagtaaaacagcttgtctgtgctgatagccaaatactctctttcaaaaatcacttattctttaattatgcacctgtgtgcacttgagcgtaggtgtaggtgccctccaagtcctgaggcatccgattccttggagctggagttacaaatccttgcaagctacctcgagtgagtgccgggaactgaagttgggctttctgcataagcagttcacactcctcactgccaagtcatctctctagccccactcttggtgctagagtttatctctcttaaaagactaccttgcagtcccttactaagtacagttgagaaccccttaccgaaaatatctgaggccaggttggggtcttcgggttttattgcatctgcatttataaaatgggccgcctcaaggtgtgggactctaaacaggacactgacacacagtctgcaggaatttaatacaggatttttacttgtgttttgacctgagaccaacacttgaggccagttgtctagtgcaccattagtacttacacagtttgttttagataatgaatgttcagccagaataaaatctagataaatgcttgtagctgatagccatttactacccatcaggctgtcttgccttcattaaactgaccgtgtgtatgccgtgtggtagaaaccacagtttgtgaaagaaaaggtttcttttgggaagcgaatgtaggcgtgcacggatagtgaggtgtgtgagctttgcacggtcagagctggggaactaaacagagtgttagtaactggactcaatgatggccgtgatgaggaagttcctgagagaagagcggaattgtttgcacagttcaaagtggactgctcttataagatgaaatgaggaaggctaagtgaggtgagatgcttcacagtgccagccaaactggctgcccggtggctgtgcagatcttgggctatggcttgccactgggctgtttctccctgccagctgctgtacacgggaaagccaggctctgtttagatttaagcgtgtggggcttttgtcagtgagttgtttgttgttcctggatctgaggtccctggggggcggggcaggggtcacactgaaggctgcattgccacactttgttgttgtttgatagtatggagattgacagtgcagattagaatatagagtgttacatggtatagagcgttatgtagtctagactgttgcgcagttctggtcttgctgttacagagcactatgcttctgttagcaaatgcagcaaatgtgatgagaagtcccatgttgtacatttctgtgagaagcattttatataacatgataaatatttctgtttctataacctgttaaatatttctgttaaagacttgctttccccgaagttgcagaggtgcacactgttggaagttcagattacagcacacatttttgaggtgaaccttggaaagattgagagttgtgtgtctggatgatgtggttggttctcctgctgtgtgtcgtagatgctgacagtgctcgtccctgacgcatatttcggagtagacagatagcactgatgagaccctgcaaagtgcctgcaggaatcaatttgtgtttatatttataaaatgatgctgaacttgtggctgtgagctgcgctcggcccagagccactaggctgctgttctcgagctgtccgtctttgaacttgggataaggactgccctcctctgtgggctcaaggatccatcaaaggcagttagggcttatgccccagtaaagggtaatttaaaggaaagaatgccctggagccacccgactcagaaagatacatctacaatgcatccatgagtcctctgcgcctccttgacttttgattagttgtacagtccctgtgaactgccccgctcaccccagtgctccctctgcacatggtccagcctccacatttgatgtgcctctggatgctggctggcactagacttgctgttgtgtgtgttttgaagctgtccagtgcttcgcttatctttctcccattttaggagccacttttctcacccacaattctagcttcacacagcaagaactgcctcgcactagcggcaaggcaagtattactggattccgtggtagcagagttgccaggaaggctgaaggactagaatagcaagaagggcagaatggagagatggcagaacctgttcggaggtacgcagcagggccactgtgccctagcctttctttgcctcctcttgtcctttccgagtctatgtaagagcatgcacgcctgacagtgggtattgctatgcacacacccaggcacattcctcgtgtttgagtttctttgtgtcacaggataagtcaaagggtgtgtcctacacttgtttgggtctcttggcagtagtgtgtggagtcctttctctaaggagcagacaaggaagaagagttagccgagtgccaagttagttcctggcttgtactaactaaggcatgaggaggcaggagggtgggtttctgggcgttctctggtgagctaaagcttagtgtcatgcgcttatctgcatagttgaccatttagagtgtgttctcgtggcacctgttactcagtgaggtgtatggcattgtcattttatccaggggaggtatggaaactgctgatcaaggaggagatatgttctaacaaaggcaggtagggctgggactcactccagcccctgactgctgagccctggggagctttcccagttgtgctggcctgtgcacctgtgcatgtcactgtgtccacactgccggcctgtgtacctgtgccctgtcactgtgtccacactgctggcctgtgtacctgtgcatgtcactgtgtccacactgctggcctgtgcacctgtgccctcacactgcatctacactgctggcctgtgtacctgtgcatgtcactgtgtctacactgctggcctgtgcacctgtgcatgtcactgtgtccatattgctggcctgtgtacctgtgcatgtcactgtgtccacactgctggcctgtgtacctgtgcatttcactgtgtccacactgctggcctgtgtacctgtgccctgtcactgtgtccacactgctggcctgtgtacctgtgcatgtcactgtgtccacactgccggcctgtgtacctgtgcatgtcactgtgtccacactgctagcctgtgcacctgtgccgtccaccatgtccaccatgtccacatgtccaccatgtccaccatgtccacactgtttagtgtggtatcccagggtcgggaaggtgccacagccatcctactgcacagaattacttcagaaaggacctggatgcgcagtctgagtcaggaaaagctaatttgatattttgtattcttgttctgtctacttgtgttgcttaatgttgtaacatgtctctggttgacagcagccatatgtcattcaaatggaacctgtactttggcattggcctgacactcactcagctgtggagcccagaaatgaaaattacagaaactgtatctattcattagaccagtggaactgataagcacttttgcggctctgccccacaactcttggttttggcaaatgaaagtacagtagattaagccccctgctcttttcccccactgagcactgtatatttgtttcacacttgcagattactgtaaaagccagatagatgagcactttaaaagattatagcaatggaaaatgtgttttgggaatgaactgcctcaaaacaagtattataagaggtgttctagtggattctttttcatatcacattaaacactctgcagacgtaacaattttattttttagagcattgcatggttttctgtttcaggagaaaagggcttatgccctattgtttttgtcaagccttatgccagctctcactgggagtcgagctatatccacatgctctgtgcatgtgagtatattgcagagggtttgtgtgtgcgcacgtgtgcgtgtgtgtgcacactctgtgttcttgtgctccacacttgctctttcacaggaaaatgaagtcagttctttcttgtctgagagagaagcaaaacaaaaattcaacagcccagatctcagccctctctgcagtagcagatggcaaactgtaatcaggggaggctcctgccagccctcagtttcagaagtctgtcccagtggggactgctggcttcggggagcccagatgcccctgagggggtatatgagctgtgagatcggccaggtggtaagagagcagcgggctgatgccgccaagaggaagaaaggagagaaatgagagtaaatgaagaggtgttttctaaggggcggggggcggggggtgagagaatgaggatttggaagtaggcatgtgtaagaagttagaaaatgggatgtagtaatggaaagagaaagaaaagtcttgagtgttgtgtgagagtgtccccaaggcttcttaccaggtctgtgtggggtcctgtactgatgcagtgctgtgtggaacaaggcttttgctgagtgctggtcaggctctgtgtcatagggtcacagtcatgggtcgtatcccagcctaatggctgcagcctttcagtgctgtgtacattaagaaatgtgtgtgattgtttaagacttaaataagttttgcataaggaggtatttgtggctttttgttgtttcaaaagttttatgctttcagtaagcatttgctaatgtagaataaaggaattgtttaaactaaagaccattttctcgaatttctaatgcagggtaacaggaggatcaggagacggttctgaaggaagcagggcttgctccgtacagattggaagagggtttctctaggacttccggctgtttgtcaggtggctgtgcacacgcatcctcacaggcagagggtagcctgggtgctcttgggaaagcaaacaagccccagccattcctttctacttacctgaaatagcaggccacactcctcccctcaggctggccttgaactgtggaatcctcctgcttccgcatcctgagtactagggttagaggttctactgtgtatagccacctcagctagattttgtttttcaattaaaaacgctttactttagggggtggaagatgtctctgtgggtgtttgttgaagaagggggatctgatttcagatctcttccacacacatttaaaaagcaagaggcaaaaactccaaaccgatgggggcacacatacctatagcccccagctcagttaaagttgtatttctgggtttacatagagtgtgtgtgtagtatcatgatgcccagtgttgcatgagccacgtgtggggatgagggcctgtcacctgcacttcctgggacacagaggtagcagtatcagaagttgaaggctatcctttggctgcatactgagtttgaggccagcttggcagtggacacccaccccttacttcaagcctgggagcttgttagttttctgagagccaggggccagggctcctccccactctaccacctttttgtcccactcttagccccagactgagccccagccaccccctgcagcttcatgttgcctacagggtacacacccacttgtataatacatattcaagtcatatctacacacacacacacacacacacacacacacacacacacacacacacacaccaacacataccctttgccctgtgaccagaaatcctgaaggtaatgatgtgcacgcctgtgtctctcctcccgttccctggctttcccttcaagaaggtcctgctgctgtctccatggctgttgtaaaatcagtgctttctgcatctccagctctgctcactagttacctcagagagaacagcctttgtaattgaatattccttgcacgtgaccccgtcatgcagctacaaggctgacattgcagcctcagcaaaggttatctcttgaaaattcccagaactcccctgtcggcacatccatgctggcagccaggtttaagtaaggaactgggaaagctctcaactcctccttctgtccatgtaactatgggatctctgccaggagggtaggtaggcacatggctccctgtagcaacccccccccagcnnnnnnnnnnnnnnnnnnnnnnnnnnnnnnnnnnnnnnnnnnnnnnnnnnnnnnnnnnnnnnnnnnnnnnnnnnnnnnnnnnnnnnnnnnnnnnnnnnnnnnnnnnnnnnnnnnnnnnnnnnnnnnnnnnnnnnnnnnnnnnnnnnnnnnnnnnnnnnnnncagcctgactccagaatcccctgctgtcttggttgtgcacagagtgttgttgttacaaggctttcacttggggttttcttaccaccccccccccccccccccaacacatacacacaaacatcctgctttatagattcagaagtatctatagaatgctggagtttgggcaataatataataaggaagctctccagtgagatgccttcagtcccagtacatgagctcatctgtgtgccctctgcagcctgcactttctcggatgcagaattcccaagtgcaggtggcacaggcccttctattttctggtcacctctgccgaggaggtgctgcttctgggagtgcttgcatagatcacctggagccctttctctctcagtccacttgatggcttccatgggagaaggctttgtggagccctgttcatgcattctcaagatgactgcccatgtttggggagggggagaatgtttgtaaaggactagcagaactgtccaagcttccccccagcatggctccttttactgtcacagtcttcttccagctgataaccctcagtggattaggaagattgtagactgctctcttctggctgtctcgtcaccagcaggccctctgagttggtaatgttgctttcctctgccatgccaacttcacataatgtttagagtaaaattctttaccctgtgttacactatacgtcatctctaaagcaggctcctcttccttttgtgccgtgttttatctgaaagcactccgtagagtttatagaccgagtgttaaatgtccttgatggatgcttgagaaggagctggggaagtgcatgtatgattagggcacttgaacataaaactacataagtatgtatgaacatacctgttcatacttatgaacatacattttcatacatatgtatgaacttaaaaccctaattatatacttgaatgttaattttatacacagtaaaacctgtttaacctgggttgtaatggaaagtgtttcaccaccagcgaaggtctgtgttttataaattatttttttttattagatattttcttcatttacatttcaaatgctatcccaaaagtcccctattcactcacccgccctgctcccctacccactcactcccacttcttggccctggcgttcccctgtactggggcatataaagtttgcaagaccaaggggcctctcttcccagtgatggccgactaggccatcttctgctacatatgcagctagagacacgagctctaggggtactggttagttcatattgttgttccacctatagggttgcagaccccttcagctccttgggtactttctctagctcccccattggggaccctgtgttccatccaatagatgactgtgagcatccacttctgtatttgccaggcactgtcaaagcctcacaggagacagctatatcagggtcctttcagcaaaatcttgctggaaaatgcaatagtatctgcgtttggtggctgattatggcatgggcccctgggtggagcagtctctggatggtccatcctttcgtcttagctccaaactttgtctctgtaactccttccatgggtgttttgttctattctagggaggaatgaagtatccacgtgttggtcttccttcttcttgatttttttgtgtttttcaaattgtatcttgggtattctatgtttctgggctaatatccgcttatcagtgagtgcatatctaatgacttcttttgtgattgggttacctcactaaggatgatatcctccagatacatccatttgcccaagaatttcataaattcattgtttttagtagctaagtagtactccattgtgtaaatgtaccacattttctgtatccattcctctgttgagggacatctgggttgtttccagcttctggctattataaataaggctgctatgaacatagtggaacatgtgttcttattaccagttggaacatctgggtatatgcccagtagaggtaaattggctgaccttcagcagaaggtggaccttgcacactggggtggtagcggagagactagaatgttggtggagggctctttaaaggtaacaaggaggtcaccccacttttgctttggagtcgttcatgctatttagcagctgtacagactggcccactggaagcacttgtcagtcaggagacagggctggagagagcaggagtctgctcagctaaggaaaggcattggcctttcttgtttgaccatacatttattaatcttaagttgcatgagagttagggcacactccatgaagcttgacagagttaattttatgaaaattagaaggttcaccactttgtaaaatggataacaatgttgtagaatcactgtcctaaagaggtagcatagactggaaatacaaatgagtgtaagaatctaaatcagttcatggataacagagtcatccatgaactgatcatttacttaatgagagtaaataaaggctgctctggacacatccctgactcctggaaatcgaggttaccagaggcactattgtttagttcccacagccataaagaacattcgctctgaagagcactggtctgtgatctgctaaggaggaagcagttggacctagaggaagctctgagagattctgttggccaggaagaacataaagaaaccaagcaatagaatgacacctgctctttcctgtttttatctgaaaaccttctattgagtgcgcctaaagtttactaacaaatttgccattaaaaaaggctgttgtagccggtggcacacgcctttaagcccagcacttgggaggcagaggcaggcagatttctgagtttgaggccagcctggtctacagagtgagttccaggacagccagggctataccgagaaaccctgtctctagaaaccctgtctcgaaaaaccaaaaaaacaaaaaagctgctgtaacaaaagaacttttcattgtttcacaaatcaaaatgtaaatctatgttactacaatgaaaagcctaaatttcttggtggggggtagaagggtgctggtttgctaaatcattctaaaaaacgtgtttgtttttgagtctgaataagcagcagtgtttgtggtgtaaggtgaacgtgctgggaaccagggcacagaagaggggatggaagagggggcagaagaggggacggggtctacaggggcctgaggcacctttgagctccagcgcacctccgccttctggatcaaaggcaaggccgtcctttgaccctgcaatgatcctggagccctggagtgcgttgccaactctttcttagccccagctcacttgccgccgcgccccacccccacctctgtgcgtgtgtgcttgtgtggtggttctgttcttgaagagaggtggagtaaggtggaacaaacttgacttgcgtgcatgtgtgcagcgtgcatgctgaacacagtgcttgtttgttgatggcttattttcaagtataaagaactagttggaggaagctctggagtagtttctctttagctgagtttgggacaggagcgggctctctctccctccctcttttaaataaaaacatagaggaaaaaaaagcacctgtgtccttgagtcttctcagttggggttggattaaaccgcttggaaggaaacacttgcccaggtgaaggcccttgccttcctgcagcctcctttagggtgggcttgttggcctcagcaccccctcagctgcttcagccctgcatcagctgacgtgctgaatgtcttgctgtttttctcttgcatgggaaatattctgtgaatttaaaagctagcagaattagcctcagctgagtggaacttaagtttttttgttttgttttgttttcctgtgggttttttttcaattgtgtagattttacctggaaggacctaaatctaatgaaaaacagattgcaatgatttctgctattaaaggtaaattgctacagtgtttgggtttttgttgttgttgttgactcttagcagacagcagttgtaaataatcagaaatgaattgcatttttttctagggccatgaaaaaggtttttacaggctacgggtttgataagagattgtagataagtaattcgttgtctgtatgcacctccacactttcgtattaaaacagcatgatttagttcttggaagcttgtttccctaagtcccgggtcaggtgcatggacagggctccttatgacgtctgtcgtgggaaccagtgtgcttagtggctctgtcaggttttgactccgtctccctgcagtgagtctgctgatgttggacagttggatttctgcatttccaacacgcagaattaaacgcccagctgtgcaaatgtttgcttagttggttcattttttttctttaagataaatacctagagacagaattcaaggaaaaaagatgttgcttctatacacactgtgacctagcttagagacttgcttttttatttgaatagaagtcataattatttcaatatgcccagttgctctgtatttttcttatgtcaagtaaaaacctgtgaaacaaccattaggcacctagcttgaatatgttaaatatgtgttttaaaataacttatgggttagtaaaagtgtgcaggctacagtttcgattccttttctctattagatgtagatgtgtagtctcataaaattttaaggtatgattattataatgcccagattttaagttatatacaattggatgagttttgacaaagtccaagtattcgtgaaacgattcacaaattaagaattttttaaaatcatttttagaaagctcttgtgccccttttagtttctcctgtcctgtggctgttagtgtggtttctgtgatgtgcttggacctcgtacataggtgcatggagtgtgcctgcatttagtattctactgtttctctttaaacctctctcttaaagtacagatgctgattgtacttcttagaaccaaaggatcgggtaagagcagtaggcgcaggcgcttttcaaagaatgagatcgcaccccgcacctgacttaaatgcccatgttcaaaagtgaactctgagtggatgacagacctaggtgtaagaaagaagcttcaggctaggaacgtcgtgaccctctggagaacacacaggagcactgtcatggccattaaagcagaggccacaacaacaaaatcaaaaactgaaaacttaccgggcaggtggaaggaaggaagcggcagaaccacagcaaaaaacgcgtttgcagtgcctgatgacacttaataccgccctacagccctcgggtgacacgcccacgcacatggcaaggggacaaagcatggggggaggtgtttcccagcggccactcagtaggtgaagtgacatgcccaacagcttgggtcaccagggaaagcacagtgagtggcgctcactaggatggctgttcccggggacaccgtgtacagcagcatgcagggcctaaggattcaaagcaagcgccatcagaggctctatcgtcactctggatgcacctgggcaaacggaatggggtttagatggatgcttttaaggccttgttcagaacagcaccatgcacaaacccactgatggggaacaacccaagcgtttctggataaacggccttgtatacgtccagtggcctttagaaccctgcccagagtgagataagccagcagagcctgcacagcagtgtgtggccacctgcatgagagaagcagccatgtccaggctcgcagagctgagtgttgagcagcagctgcaggggctggtgggggaagagcaggagtcgtggttgtgtggtgacctctgcagatggacatggacggcgtgctgcctggctttgtttctggtaacttgacacagctcgcatcgtttgagaagagagaacttggactgagaaaatgcctccctaagaatttcctgattaacgattgatgtggcagggcccagcccactgtggtcctgggttgtgttataaagcaagttgagtgagctgtggagagcaagccagcaagcggtgttcctgagtgtcctctgcttcagttcctgcctcaggttcctgtcctgacatcttcatgactgtaaaccacccctaacccctgttgcttttgttcccaatgttaatcccagcagtaagtagtaggcgagctaggacaggcctcgctgacagcagcttgaatgggcggagtgtcactgcacagccaactcctcagcatggaggtcttcagcagagcctagcatggaagagagggctgggtctgtgtgaactgaagagagctcactcctctcagagcacagtaatgagcttgtttccaggccagaggtgggaatgggtttgagcaaattgcgtttgttggtgatgggtgtggagcagtcttaagtcttctgtccgcttccaagttgtctttctgcaggaacagttctatatgaactgatgcggcgggtcgattcaggtgtgccaaggcaaggtgccctcagcggaagctgggcggtgtctcggctttagtgtgccggagcttccgggagctgggctgccacagttctgtctggtgtttcactgctgcttagggggcctttagcctggactcctgttagcttaggccaaggctctttgggagatcaaactgttcaccttagagctgatttcctgaggtgccttgaaggattggtatcttgtgtaggagacgcaggaaaagctggcctgagattttgcagcccttagggctcctgttagtggatgaggccacagagggcccctgccccacgctaatcctttccagagggctctaggaccctcctaggttccccagcttgagtgcgctgtccccatgtcccttccttttagggctgaaagggtattagttggaggcaagatttcgatcttaaagtgtagaattagaaatgtaagcctaagaacaagatcagaaccacatgaaaacaaacctttcatgcaactacagtgagaatatgagttttaccacatctatatccctcctccctcctcaagctccacccactcactaccacatctctatccctcctcccccctcaagctccacccactcactaccacatctatatccctcctccctcctcaagctccacccactcactaccacatctctatccctcctccctcctcaagctccacccactcactaccacatctatatccctcctcctcctcaagctccacccactcactaccacatctatatccctcctccctcctcaagctccacccactcactaccacatctctatccctcctccctcctcaagctccacccactcgtcgtcaccctttattctctctgccctttctttccctctgttctttttccactaggagtagaacccaggtcccatgcctgctgggtagacattcctgagatagacaccctctctgcctcattgatttcgtaaaggcctagattctaccctgcccttcacagagtgcggccggtggttccttttagatggatgcttttgtgctgttactgtttgtgagttcagaactaatacccaccacagacaaatggcctgatgccactgtaacctttgcttgctttttgggtttttttttttttttttttttgacttaacacagtatttttagttttgaaagatcttgaaatatgtgttttgacagtgttgtgtgttttatgccacctttccaactgtaatgtaaaacttagttgctttttcctgtttgccttgcatgccagttagagtgcttcttcctgacagttgggacaggacccgacagagccgcatagtaagtcagagctgcttgtatctggagacccgctgggtcttgaggtcagtgatggagaaggagaaggagaaccttgatggttcattcattttggaaatgagagaaaggtcagggtatggtgaagagaaacatggggaccagtgtcccctcgtgacacagattgagactcgtttcccttagagggataatttcctggagagaacacttgaggaaggggcatcacatcacctttaggcacaccttcctcctccaatagaatccttggaaacactcagcttttaaaagagaagttgttgttttcaaatgtagaagtgtcaaattgttgaaatagattctttttaaaagtcatgagaaaacactgggtcccagatattttctggagatttcccattagcctagtttgctgatactctttatcgagcagccatggatggaagcacagggcgtgtggttgcagtagtgactgaaggctagtgggttccagggttggtacgctgctgacttcccactggtagatggaatgaacctgaaggcagggctagtgctcactcagcacaggtgactgcgtttggcgagtttcaattgcacatgctgattctctgacccattgggcaacactccttcatcagataacttagctggcaggtcctctgccaagggcatggctttggtgtgggagcagatacacacacagcccaaggctgaccacattgttctcgtggtaaaatgagtcagtcaggcctggggacaaggattgtggtgaacttgcctgctctgtgccagggtgacacctaaggcagaagtgcccatggccccagatcttagcatgtgacacatggtactgtcagcctcgaatgcatgttagtctgatagtctttgttgatactaaatacaattacaacagtagagactgccaagactctgaagagcccacatgtactttgcagtatgttcctcatggatgtctctaggcctttgtcactttgtcacttctgccttagcgccacagaagtaatatactgaatgatagacaccagggctaaacaagtctgaggtggactggagggtagtactgagtacctggtggccaagtactgagagggtgggcgacagtgggctcctgggctcttggggtggtctgtttcataatagtggcatttcatttaataagtctgaaaaagcatttggtgggtgtttctaaactggtcaaaacaaagccagttaaccattaaagaattgagccttagttccagcagtaggcaattacttaccatattgaaaaaaattggttcttaaaagcagtgcttagggtaggtaatgttacgtgacagcttgtagtttgataaggagcatcagccttggtatgggcacctgcctagagtccagattggttgccagaatcagtgtgaaatctcgagggaccccagttttacagctgtatgtgcatgacaatgacacatgggccatccagtttgccttgcctggcagacagagcagccctctctcagagaacgtctccatgtgtgtgagagtcagagaacgtctccatatgtgtgtgagagtttccgtaagccacggagtccccgtgggagagctcagcgcctaggggagtcgctgtgttgtctgaggcttcctgacatctcagctccggcaggcacgttctcctcacctgccttagatcacacaaggttgccatgtgagtctgcattagttaccgaatcagacataggtgctggctgggagtgcgtgcaccttgtcctgcggtgtactgttccagcatgcggacttacgctctagggacattctttggcttgacttcattcaatgtgaaatatcaaactgtagaataaataaagcaaagatttcagcagtgctattaatttaaaaaaaaaaaaacttgcctgcttgtagcagcctacattctgtgtggtgaaaagcccgtttaaaacctatttgaccatactttcagtggtcatagcagggaggttttgaaccaacaattggcctggactgaaagagagagaaccattatcccctatgcactattctcctttgaatcgttgtgtgtgctgtgaactagtgcattgtcttagatggaaacgctttagtatcacttcttttccattgctcagtgtttttgtaaataatttggctcttcagtgtggatctggtcctccggtttctgaagtgtgtgggctcctggggccgaggttcctggagttctctcgtggaccatattgtggtatcattagcaggaggtcttcatctgcagcagcagagcacactcacagcctgggttttgtttttctttttctttcctgctctcctaattgggtggtggtggggcacaaaaagattatggaggggaaagaagcaaggaggacactgtcagggctgtaatcccgcatgaggagggccatcctctgggtgtgagtgagaggctgatttctgccggcttggtctagctctggtatttgtaatacaagttctttgtttttccctgctctatccactaagaaaactactctctactagatgttcatccttcaggaacacgtttagggaggtattatttggtatatgtgttggctttccattactatgacaggatccgaggtaatgctctcgagtgggaaagcagtttctttggctcccagttttgagggcacaggctagtcctgcagctctgggtccttgatgggcaacccctcatggtgggaacacgtgacacagagccttgttactgcatggacagcagcagtaatgagtgtgcctggggccaaggggctgccatgcccctacgatcacaaaggcttcccagtaggtccagtttcctacacttgacctctgaggtacatgcaagatcaagcggttttgtttggtggtaatggggtacactttctcttagcaaattattacgtgcaagtgctggcgtcaccctctgccatcatcttacaaacagggctggggtgatctgacccagaagcacacacaccatgccttgtatccaaccacagctttcccccagtctgtgaaggggttaccctgggctgtgtgaactcactgcagtttgcctgttgtgtggggatggaattaattcaccatctccttggctttcatagcaggagcattttaaatgtcagggtcagggaaggaaccccttgccactagacttttatgacttgatactgataaagtagcattttgatggcaatcccacatcaccattgacttcatgggtagcacgtaagcagaggcagaaagtccgtttgtctaatgaagacagaggtaaagtgtggaatcgagaacccttttcccatgatggcgtcaaagccatatttgagttgagttcccacacctcttcagttcctcatttgctctatgtaactttctgacagatgccaccgcagtacggacagcaagctgtgagtggctactgccagcaaggccagcagccatactacaaccagcagccgcagccctcgcacctcccgccccaggcacagtacctgcagccggcggcggcgcagtcccagcagaggtaccagccacagcaggtaagcgctgcccgcatgcatctgtgttctcctgcagggctgtgttcagaggctgctggcgccctgaacgtcctcctgccctttgagaggcactgtgggggttgaggtgcgttttcccctttggtgtttcaagacagagtttctccgtggaccatggctattctggacctcactgtggagcccaggctgtcctctaactctacccacaaggccctgcacttcccctcccttccctccttccctcatctccccactactgcagacattgaggactgggaagaccagctttcagtagctgcttctgttactgattggtggaaggcagcacaagtgtcagttcacttcacatttgtgttctcaaatctttccaaaggcctttccacctagagaggcctggtcaggaggggttgcaggtcatgtgacggtgtggtgctggttgccttttgacctttctagttaggacattaagtacctcagcatgggaacatggtcgccttggagtgttagtcttataaactataaacatggggtcccttcagctgtagaacaagggagacacaagcagagcggcagtgagctacagtaaacagttgctgggtctttcctgtcctgcctggctcctcccttctcttccctattttcaggaggggtctctggcctcgacctttgatcctcctcctgccactggtcccctgcgtgctggaactgtgtgctgccaccgcacacatggagtttctggttgaaattagactaattaatcacctgttttggaggcaggtatgctggctgagcaggtaaaggcacctgcctgagcccagtgattcgcactcatccccagggctcacatgatagaaggaaattagattctcaccatttgtcctctgacctccatgtgtgcacgcacacacaaatacatacatgtaatagaaatgcataagtatttgttattgggccatctattgtagtttacataattgaaaaaatagtataatatatattgtgtgtgtgtatacacacacacacacacacacacacacacacatgctgaagtgattcagtttcatttgctttagactgttgctcttgagtggagtgaccagttgggaggggctgagggtcttgtagtgagcgcagacatagcacatagctgctagaggtcctcccggaagcagcgcctctttcccagctcaggctgccctcggcactttctctgttgtggggtgggggtggtaatgagaacaagcaggtgctcacaggcccgctcacttgctaagggcttctttatggcacaaatagtcaaatatgtaagcatgtgtagtttctacatacaaagttttaatatttcttttagttatgtgtattgtgcgtgtacagctatgtatcttggagtgcttcgcccgtagcggagtcagctcctaccaagagctggagtttcaggtgattgtgagaccccttaggtgggtgctgggaactgactcagcaagtactcttaacagctgagccatctctccagcaccatggaactgaattctaccggagtgcattttaaagtgattttgggatttttacagtccattgccacatgactttgtgtattttaagaaggtgagcagccagtccagggtttgtggaagtggggtgtgcagcccttcagttatctagccctcaccagtgcgtgaacatttgaaagcacttcctatcagctccctttggtgagaatgactggcatctgggctgtgagagataaggcttttcgaggactttcagagccctattgaactcatcttgggtgggggtgcttggtcacttcatccagatactctagtgcagacagcctgttcatcttacgctcatgggcctaaatgaatctcagttgtaaaaacagtttgattaaggactcctgagtacctgtcatttcctcaggaccacgctccaaatttacttccttcatgaagtgttcactgatggcttccagaagatggcaattagtcacttcctatttttcatatttaaatattgacagcatgccacaggcagggccagttctaatgactgctctgttagttacttagtttatggtttccttttgcagttcttactgtatattgacttgaatgcagtgagatatatgataaaaactgtattttaaccacaatggctcaatataagaattattattttaaaaacattctgagtaaagccaaacttgtcaggactttttcttaggttttcttgtgtttgtttgttttttgagacagggtttttctgtgtagccctggctgtcctggaactggctttgtagaccaggctggcctcgaactcagagattctcctgcttttgcataccaaaatgctgggattagaggtgtgtgccactattgctcagctgagtatgtttaaagtttaatttgatatctaatacagtgactatcttaaaagggggggagaaaaacaagaaaagtttcttgccatcttagttactcctagccatgctaccacctatatcacactttgccaaataaccttacaattatagatacatatgtacacacacacacacacacacacacacacacacacacacaggaaattacaaagtatcatgtaactcctgccctcttttgtacagttgaagatgtactgtaagctgtgtgtattccctgttactctttcatgcacacacttaaatagattttctagagctactttcatttctttagagccttattgggttttataaatcacaatatatttagtcggttctttttaatgtcatttagatggtttctaggtgtttccaacagtgttgcccttataacttgtgtatgctgtttcttacatagacatgagtagggaggatctgtggggagttcttccatgcagctctctgtcagaggacgggactttgtcgtcttctagatggttttgccagatggtccactgtggagggcacctccttttgtacccaccacaagcaccttaccctgcctgtcttcagtgctaggcatggttttctgggagataaagctgtgggtctggatttgttagtgtttttcctgagctataaattcctatcttttaatcttgatttctttcatttcagttttaaaattgatttatgaaaattctgtgcattttggtgggctccccagaaatcatgaatatcgtgtgtgtgtgtgtgtgtgtgtgatcttgattgtaggaaccggggatggtgggactgaggaggtgactgatgggcagaggtggtgcctcaagcctgagggcgtgggcttagcctctcaggacccctgtggtagaagaagagaagctgcctccggaagttttccttgacctccacgcatttgttgtggtctactgtatgtatgtacacagaagagaaagaaacaagatgaccaggatgaaaagatggagagtgacaggccccaagtttgtgtgtggacaggagaccatcccagaagggccctggtgtgggtacggggtgcgggtgcgggtgcctgtttgaatctggcctcgggagttggatgaggcctgcccacaccaaaggctatttgcttgattcaagtcgccggttaaatggttggtttgatccagagaaattgtgcagctgcactttccgtcctccctggagaggtggcttctgtcacttgctcagttctctgatgtgtgctgtttgaattcactccgggctccattcttttctgtctggtttcctctatagtagtttttgtttgtttcttttgtttctgctgctgcttggtatgtgctaattgcacatcctcagtgttctttctggaattttctttcttatgttttgctgtgtaacacagactggcctggaacgtcctcttctccctttgctgggactgtaggcatgtcctaccatgcctagcctaaccctttttcgtttctttctgttttttttttttttttttcctccttaacaaatttgtctgtttctgttgctattgtaattgtgtgttttcttgctttatatatttttctctggaatagttagttcttcagtggaaagccaatcagaacagcgtgtgcagttgagcccagccatgaaaggccaggacatgtgactctgagtgtggcccactagattcttgtgctgtaggccagggaggatgctggcccacagaacccaaggagcatcttgggaaggaggttgttaatagtgctgggtgtggtgtgtaagagggattagggagtgagagtcagtcctcaaggccctggggaaaactgggtgatttgaaagtttcataattggcagggggagtaaagtgatatggcgttgacatggttagtgaggccaaagtaatggcagcactgtatgctgaaggagctgccctgcttccctgccgttctccaccccagctgcattgtgtcacctctcacttgactcttcaggcagctgatgctccctccactgtcagcagcactgccccaccagggagaacctcaggcctttcttcttttgttgctgttgtaaattgtattctttttaaaattatgtatgtgtgtctgtgtaagtgtgtgtgtatgtgtgtgtgaaagtgtgtgcctctgtgtgagtgaaagtgtatgttccgtgtgttaagtgtgcgtgtctgtgtgtatcaaagtttctgtgtatatatatgtgcgtttattgtgtgtgtatgtgtgtgtgtgaaagtgtgtatgtctctaggtgttttatgtgtctgtatatgtgtggaatatatgtgtgtgtgagtgtgtgcgtgagtgtgtgtgtgtgtatgtgtgtgatgagctcagtcctctgctgtctgttttctgggtgacaggtgcacactcttgtgagggctgtgcttttttcatgtcacttgattttcataggttttgtcatttaaaacatagttaattttttaaaatacagattatcttctgacttctttttttttcctttttgcaccgagcctttcccactgtgttgttggagggagctgacaggccaggcctcttagtcttgagtaaatgaaagtgtctgtgctgtgtgagcctctcttcttctgggagtgttaaaccagcctcaagataggctgtatacaggggtgtgtgtgtgtgtgtgtgtgtgtgtgtgtgtgcatgtgtgtgtgtgtgaaagtgtgtgtgtgtgcatgtgtgtgtgtgtgaaagtgtgcgtgtctttgtgtgcacagacacaattggttcggtttttctgacatctgtttgggtttctcacacaagtatttgtgagtgagattgagctgtaatgatcttttagaagagctggagtctgtggcacttagtaagtcacttgcagacttgtctctttcctatgtccctggaaaagtttgtggtgtttgaagtgaatggtctgtcctttgaatgttttgcagaagtgtccataaagccatagcaaatgatgatggatttcttaatttttatcctttgtttcattcttgagattttaacttgtgattctgtttttttttttgtatgtgattataagagttataaagtttttgtaaaattggttcacatgagtctggttatttcacttttaactgtattaaaataagttcacagtcctcgttagtatactcttgtcagacccagagctgaggcatttgagctgacattttttaacttttgtgttgacactaatgacttgtccatgttaatggctctgatggttctatcctgtgtgtgagtgccattgatcatgtccctcatctcctcctaacatcatcccttcccagtcttaaaaaccatttatcttctgcttctagctcatctagttaagaaaaatcatttttggtaaaagctttttcagagcatccttggtctttgtcttttccattaatatgtatgtgggtatgtatatacatgcctgtatatgtatgtgtgtgtgtgtacatatatgcatgtatgtgtgtgtgcatgtatgcatgtatgtgtgtgtacatgtatgcatgtatgtgggtatgtatatgcatgcctgtatatgtacgtgtgtacatgtatgcatgtatatatgcgtatacatgtatgcatgtatgtgggcatgtatatacatgcctgtgtgtgtgtgtgtgtgtgtacatgtatgtatgtatgtgtgcaccacatcactcacacatatgtattatgttttgctactcttctgatgttgtttcttttcgattttaggtgtatgtttatcgtctttggacccttttatctaagattaatgtatttcttctaatcactgcaccaggcagtttctccagctttgatgggcgttgtctttgtctcttatttctgaggattatctgaggatgagtctttgttttctgaaagtgtttttatgcagactagtaaggattctgagctggtttcctcagaaggagtatttagaaggtctttgcttggcctgttatctctaagtactgatcccttctgggtgctagccacccatgggtgctagccactggagccacgattcatccttccgattgtgaagtttctctcttagaaatgttgtgagcacgttcatgagcagaactgtacgacctgcacacagatgcacggatgctccctgcattccgtcaccattccacgcccatcactctccatcttggtctcatgcttccttggagtatcatggacacacgtgccatttctagatagtgacatcttctccaaggactaaattctccagcttgctatctcctaaactagacctgttgagatatcagccgtcatgtgtgtattttgtctgtgtggtttcaagcagaatgtagacaaggctagtccactgctgcgtccatcccttcttcctctgctgactttgtgccttgacttacggaaaactgggtcattgtcccacagagcgtctttgccggctgttttgtctgacatagctgaacacattctgttttctgcccactgtcagcaaggtccactggcttgaagagcagcacatatccatgattgccttaactcagccccgagtgtcccccctgctctcatcaagtggctgtgctgaatgccttttgtgtggctgcctgtggtggctctagctctcgcctttgcagtcactaccaactgaggcttggagacatgagaggcagaccagcctttcccctattcccctccatctttctcacctactacatctgtgagtgtaactcacaccttgggaaggctatgggttgtatatcctgggagcttataacatcacattaacataatgcttggttgtcccacaacagctaagccaagattgattagagggttcctgtagtatgtcctctgggaccactttaaataaaattctccttctgcggttttgcacaccacaggggcaagtgttaattttgaccagacaccctggtggtggtcagcctgtggctgctgattctcaaaggagctgtgccttttattcccctgcctctgctccaggcccacctcttccttctctgttgtgggtgtgtaccctactggtcaatggtccttcatggtctcctgctttttctccatgctgtcctcccacctaccagctcagacttctctcccttcctgccctggcccttgcacagtagccaggcagatgcgaactctggaatagaagtgagcttgtcctgtgggccggcaccctgtgctcttgagtgctgctacttgcattgaggccaaggatggcagaggtctcctctctgcagctcaggtgcttcagacaacagagtagccaatcgctctgcttgtttgttattatattgctgaaaactttataaacacaagtaatttagaaggatcacatttctctttatttttaaattaaaaactttcctgatttagtccaggttgacctcaaactgaggctcctcctgcctcacccacctgagtgccagacgttccactctgcctggtttaagttgctcattgtataaaatgaagcttttctaaccccccttttcattctaaagaatgttcgtagataaagaagctacttccagaatttgtttggttatgcaagagaacaacctctgtttttgacaataaacactgagatattgaatgataaccgagttatcatacctgtaactttcaagtggtacaaaatcacaattacatccatctacttgtctgtctctatatctggctacagaatgatggagcaatttaaaaaaagataactttgtagaatctgggtgtnnnnnnnnnnnnnnnnnnnntcagacaacagagtagccaatcgctctgcttgtttgttattatattgctgaaaactttataaacacaagtaatttagaaggatcacatttctctttatttttaaattaaaaactttcctgatttagtccaggttgacctcaaactgaggctcctcctgcctcacccacctgagtgccagacgttccactctgcctggtttaagttgctcattgtataaaatgaagcttttctaaccccccttttcattctaaagaatgttcgtagataaagaagctacttccagaatttcaaataagccagaacaatgtgccaagtctgcagtagaaatgaaagcgaagctgtagttaatgccgctgtgcagtaggcaagggctcagatgcagccattcgaagcctcctgcagggtttgatgttcatgagtggtctcgctggccttcacagcacaagtagagagctggcaggagccttgtgttgttagcatgtcttatgtttccagcaagaccatcaatatggtattctgtgctctgatggtgagacacgtggggtacagttctccacagcacagcacacaggcattagttagtacactgagtagtcttcctgggaatttagggcatcctgaaacatccacagaacactttgttcctctctgcaaatagagttggtctctagacttaaacagttagcttttgtgttggtatttgtagcttgtgtgttgggagggggtgggggggggttcaggcaggattgagtcagggccccacacatgcaaggcaagctttgtactaattggccgttttcctcatctgctttttactctttgtttttcagttgcccagtgtggccttgacctcactttggggcttaggtaagccttgaactttcagtcttgctgcttcagcctccaagtagcaagtctaggcctttgggcttggctgtgtttttaggttacgcgtgaatgctgggactttttgaggtagcgtgggctgtgatgtggatccgtggctactccagcttttcctgcacagcaccacaggcctcagtgcccttctgtggtagtagctcttcttcaccatctgtctgtgcatgtgatgtgtgatgtggatcagggttagcacactgccactgcagaggacagcctttggagactggcagccgtggtggcagccatttttcctggggacctttcgccagccctcatcgcacatctttacctttgtgacaagcagttgctcacctggcatcttgccattttcttagctttggggaaatcaagttcatagacagtttgccttacactgtaaaacattaacaatcaggccagtccctgtgtgtagctaaggatagcaggcattggcacacacttattatttccccagttaaagctgtgggagactgaaaactctgttaccagcaagggggccacagagtgagctcgggtgtcagggctagctcaaggcccaggcagcctgcctctatgtgagctggcagcacaagcagtcctcagggaagccagccaccgcagggaactgttctggggaacttactctttgaagtgttcaccagggagggacttggggagagggaccatggtggtggtgtatgcaaacagattgtctaactgcaaagagaagttgctccaaacactgtagaactgttgcaagtgccttctgtctgatcatgcattccgaattaacatgtaatacttcacaacactgtggcagggcagtggcgtagcagattaggggcttggcatgcctgtctgtcctgtaatggagggcttgggagtacctctggccagccctctgcatttccttcctccttaactagctggactcagtacatcttcataatctctggaaatcctctcagatgctctactcccttagaaacccactcctaaaccaggagcctccctgctcctatcctctcagagcaggaccaggaggaggcctggtggtcttttcacttctgatcactaaagataatccctgccgagactctgcacctcctcaggttacctcacttacccttcagtgttcacatcctaaaccttcatctcctaggccatgctgctatctagttcatggaggggtgagatgctgcagcccatagacacaaaggttgctgctgccctccatagtgcctcacaggagaccccaccctcccccatggcacacatatacctgcctttcccttctcttcctcaagcactgctttctctttctgttgcttctgtgggcgtcagaacacgctggcactcttctcacccgctatcttgtctttcctctatggcccattaccacttgaatttacctcactagataagacatttatttcactacttgctgaaacagctctctccgtgtggtttttgtgcctcttctgtttaaattggcaggtaaaattgtaagtatcatcccgtatagcaggatgctctgaaagtatgcagacattaggggtgactgaacccagctaattatggtgtgcactgctcacatgatttttgtggttggaatacttctaatccacttttagcagttttccttcacagtctattgttaaccacagtcaccttgtggcacagtgggtcccctgcatgcatttttccagtgtcctttgcccagtacctccatcccagcctaggttctgacaagcaggagtgtgttgtctgctctgtgtgcttcctccctggagtccacaccagcctggatcagatgctcagagagaggaggccccacccttccctgcagatgccattctttctgattgacctgtcagaagcatttgactgggcgagcatcctgtcctgtggcttcttactttcatcactgacctcctggctctcctgggacctcttggtcaccactccctctccactctggtttctctttctctcccttcctccaagtgttgaccttggtctggcctcagcttcggagcctttcatgtccccacggttcttcactgtatgtcttcggtgtcgtggtattgactatctagtgactgtcagatgtacctgtagatgggactctcctccctgcctgtccagctcctgccctggactgcaaagaagatgactcaaaaggttctgaagctaacataaaaccatgctctgggccaccactccttctgcagatctttgccttctggaactccttcccccaaataaatattctctttttcctggcagcttgaccagaaacttcagaaacaaaaacattatgtttgtcttgttgtgtgtgccaactcttgacaattgtgtgaaattcagagacctagaggcccgcctgtcctgcctgtagcactccagtgccgtcttccacttgcctctctgcctttctgctttggttttccctgagctgggtgctgcatggtttgcacagacctgtgtattagggttttggtattgcatgcacctccccagtaggaaatcagctttgtgggaggaaggactttgctttgtggttcttttatctctagtcctgaggtcagtgtctggcacaaaacagatagacagtaaacattttgaatattgttgctattttaattattggaagtatctttttacttttctggtgtgtagcaaactgattttttagtgttgaaaaataaaacatttgctgtggggcattaagattttgtgacagtttttgataaggcccttatggaggcagttcaaactggctttttcatattctgtgtgtgtgtgtgtgtgtgtgtgtgtatggggggggggcatgtatatgtgtgcattcaatcctgcctgtgggccaacagggtttgtcttccccaaatggaatgtcagggtacagaggagcattcttttagaaacttgtatttttttttttagattcctccttgatcggcttaaacaagttagaccctcccttagctcggctgtgtgtatcttttagcatgtactttccaatggctcagtagtgtccatgactctacgggcttgtgaccctgaagggcctgctgcattgttcaggagcacgcggaagaggtcctcttgcacacttgctggtctcttctgtgctgctggccttgaggctccgtgaaccccacattcccactgctcctcacaggggaggcctaggctctcttgtcttctcctgtagacaggtagatagctagcatagagcagcgagggactgtctgccaaacagtctgttgttcccttcgtttataaacaatctctattcctaaggccttaccaaacaaagaatttcaagtatgtccattcaaaggtggtttgcatcttagtttcccattgagtattagggacaactgtaactttacagttttttctctctttcttctttttattttaaaaagatttttaaaatatatatttattatatataagtatactgtgtgtctttagacactgcagaagagggcatcagatctcattataaatggttgtgagccaccgtgtggttgctgggatttgaactcaggacctctggaagatcagtcagtgctcttaactgctgagctatctcaagtttgtaggcgttgttgttgttgttgttgttgttgttgttattgttctgtgcccagtggccttctcatccatagctgtttgggggttcttggagtatgcagtgcagggcgtttcctgcctcccagacgcctcagcagactttccctccttcccctgctatctacagagtgaaatggaatgaaggagagggttattctatcgggttcttgagatgacaatgacaggaaagacagggctttatggtggaaaacgtggtcctccgtctctttgctgggacaggggcttctgatgcagcttcacctttaagacctagctagtaagcagcctcgcatgaccacaccctccctccatgcctctaacacctccattatcacagctgacaaaagccttcctctctgtcaagggttacaccaataatctcaccagtacagctgactcagggtcttatagtaggatgcatcattagaagtctgcagcagaaagcaatggggacattcagactttgcttttgtgggtatagtttatggttttcagtgtgacccagacactgaggaaaatatcaggtattttgaatgtgttctatttttttttcttttttcttttctttttttcttttcttaaagcttttactttgagtcttggaaaacttagaggtacacatggagaagacatgatcacagaatggagacagcccaggagcatcaatgcctgcagctaatgctggagcaggggtttgacaggatagtggggctagaggaatggacttagtattcctctctccctctcgccttccacacaatccacaccagcctcctcataatccttctctagggcagccatgttctcatgggcctcagagaactcctcttcctctatgccctcatccacataccagtgcacaaaggcacgcttggcatacatcagatcaaacttgtgatctaggcgagcccaggcctcagcaatggctgtggtgttgctcaccatgcacacagctctctggaccttggccaggtcaccaccgggtaccacagtgggaggctggtaattaatgccaaccttgaagccagtggggcaccagtccacaaactggatgctgcgcttggtctggatggtggcaatggcagcatcgacatttttgggaaccatatcaccatggtacagcaggcagcaagccatgtatttaccatggtgagcgtcacatttcaccatctggttggttggctcaaagcagacattggtgatctctgctacagaaagctgctcatggtaggctttctcagcagagatgacaggggcataagtggccagagggaagtgaatgcgagggtagggcactgggttggtctggaattttgtcagatcaatattcagggccccatcaaatttgctggaaacagtgatggaagacactgtttctggctagtaaggcggttaaggttggtgtaggttggaagcttgatgtcgaggtatctacaacagatgtcatagatggcctcattgtctaccatgaaggcacaatcagagtgctccagggtggtgtgggtggtgaggatggaattgtagggctcaaccacagcagtggaaacctggaaggggaggggggctgggtaaatggagaactccagcttggacttcttcctgtaatcaacagagagctgctccatcagcagggaggtgaacctagagtcagttccccgccaaagctctggaaaaccaagaagcgctggagacccatgcactggtcagccagcttgtgaatgctgtccaagacaaggtcaatgatctcctcaccaatagtatagtggccatgggcatggttattggcagcatcttccttgccttgctcagggtgaaggagctggcggcaggtgccaggatgaacttcagtaactatgcgttccagttctacaaacactgcccgggtcacatgcttgccagctcctgccacgctgaagaaggtatagaaggggtcatctcctccccagtggtcttgtcacttggcttctggccatcaggttagatgccatgttccaggcagtagagctcccagtaggcattgccgatctgaacaccagcctggccaacgtgggtggagatgcattcacgaatgatagcaatgggttagaaagcaagggtgatagaaggagacactgggtcttggttactgttcctgacagctaagagtccaggtaagtaacacaatgaggccttgaatgtgttcttaaggctatatatatttgtctttatctgtgtgttaacttcaggtcactgcagcaggtatgacccgtgataagagcaaaacatgtgagggtgtggctcagggttcctgtctgtgcttagtagggccttgcctgctactgtggggccccagtaatcaggagaggcgatggtagagtagcagacaagatgttttccagccatgcttctctgtgatagaatagggacatgtgctggttgaagtgtctctcggaaggtttccaggatcgagagtgtgtattggtgagagatgtggtctcagcaagggccatttatttatgttagtgaaagtggagggcagtctgctctcttcgtggtgctgcacttcagaacttcagtctcactaactaaacaacaaagaagacttttcttcctccctactcccctgagattaaagaattaagactattaaaaattttaaagtttttagttttagtttttatttatgaacgcccatgggggccagaagagggggtcagactccctggagctaaagttttcaggctattgcaacttagctgatgtgggtgctgggaactgaactcagctcctccaaacaagcagcaagctctcttactcactgagccccagctcctcccccagctccattgcaccatcctaacagtgggtcagtcgtttggtggttgagacagatggaagtctaagccttgtttaggtaagcttggagtatgtgaacaggtgttttaactatattttcttaaaacaaaacaagagttgaaacataacatagtatattgtaacaacatataacaattatctgtattaatatgcaaaatccataccaaatataaaaagattttgcttgttaatgttctttggtctaaaagtagattgagtaatctacccttttttcctatcatccctatacccccttttttatcttcatttcttcttccccctttcttcctaacactagataggagagaaagaaggatagaagaaagaaaaagaaatccctgaattcaacttctttattttgtatcatccctgcccaagaccattacaactttaaccaccccccttaaactatgacaaacatccatcatccattgagtgacccaaaaccacccccagctcttaggaatatgggcattgctttcttaaaattggggagagggagttggaggtcctaggaaacttgagatgttgattaagaaagctagctgtagcgtttgctgtcgagtctttgcaagctaagaaagttcagggcttaaatgaattcctgactggaacagtccgtgatgctggataacaaagctagccatttagaaattgtcctggtgcagaggtttgaggaaacagaattgagactatctcaggtaggattgagcaggatgctggaataaatgtgtctcagcatcccagcatctcagcctctcagcatcccagcatcccagcatcccagcatcccagcatcctttcactatccccaaggatgaatcttgtttaggcctctttaaattcattggtgtctataaacatataaactttcacaaagtaacatacatttctacaataacatatgtgatcaatgatcaattaaagatgacttcctgttctctgtttaagcaggtaaggcacctgtctttctttataagttagtatgtaccgtataaccaaactgtaatagaattttttatctatgtcaattgaaaggctggcataagtcctgagattgctgtagccaacataatgtattggctgtacatagatgaagtctggctggagacattttaatgtctcagccattctcggagctgttcgcatgtagaagaatcaacaataccaggtacatgttttgttgttcttgatgtctttcatatctgcagtcaggatcttcagggagtcttcacctgtcaaatccccatgtcaaagcatttcttttcctgtggaaataaatacaaaacctcttccctagtgtggcacacatccttccattctcaggtcaggacatccttagtaaaatggctgatttagtgtagcaggcttttccataatccagggtctctcagtagctgttgggttttgttcattagcattcaaaagctttgaagttaatgaggcactgtgtaatctatctctgggagatcccgtctccttcttctcttctgtgagcattgcctttaacgtgttgttagatcctttataactgtgggattgttgagaaatatctgtaacatgttctatgagtaatgtctaaaatattgttgcattgtaatggatacatatgtcagagcatcatcagcgccatctgccaaggcatctcagatggaccatctcttaataaatgtgtcatctcagaatcagcgttttcagaatttaaggcaaaagccacttggaattctgaacatgtatcaactgtatgatgtattaacacatatttctccagagtctataaaatgaaacctaatctattgtatgacattgctctaaggtagcatcatttagcagaatctggatttataattcacaatattgcatctctatgggctgccattctaattccttaagccattgtggatttttttcatctatagttatttcgaagataatttaatggtttcacatcagcatttgtgacctttattgtcaaagttagtagttaacctctacattttggagtgtactggattataatttgataatactgtatttccatgtttaacattttcaaaagattttatttctttttagaatgaggatcaaaagggaaatccaatcagagactgagtaatgacatagtaatgtctgcttgaacacttaatttccttcagaaaggtgggagagggtgggttcctgcctggactctgtaggctggagcactggagtgtgctctgggctggagtgtctcccaggcctcccatgagcatctgctttgtagagtgctgggtctgttggaaaagtggggagagcctgaggaggggcacagtcatcaaagcccttgtattttatggccttctcttctcttgatgcttatatgctgaggcgagaaaattggggttcccccatttttcttttcactacttttagcagttttcatttgaatttaaagtgctcattttagtatgttagagtttgaaaaggagactcaatttagagacaaataagtgactgattcagtagttccagtttcaggatcccagtaccctctttgaggctataactcattatagagacccattgccctctctctgctggcctccatggctaccaggcaaaacagacaagcatgtatgtaggcaaaacaccgcacacagaaaagtaacgaacaaactaaaagttcttccttctcagtcattttgatgaaagacagttctgtagagtagcaagctgtgcatgtattgtttcagttgaagcaaattcataaatgctcacaacagtaccattactgggctttcctagtgtaggttatggtccccaccaccacaaccaccacacatactaaaggggataacaacaggactaactcatttgcagactgattttcccccaaaacttggagtatgaggtggggactctgttcattctctggattaacttggtgaaagcagtaggaggcagagagtccgttggacaggcgacagtaaggattcataaaacgcagagggagggaagggccattgacatgagaactgttgacagcgggggatttacttagcaagttctctatcccagctgtagtctgtggaggactttagtgtcagtctttagctctactagaaatcagagtgtacatccaagtttgagagcctctcctgtacacagctaactggtgccttccagtcatggaacacagttccggtacggtaatctgttcctgtaacactgggacgccacactgaggcaatgcctggagttcggattgactgcagctgtgctttaatctaatgggctccccgtctctctcattgctatttatactgtggagacacattgtgctccagagatgggcagatggtcaagcctagaggccatcggtgacagtctttccctttgcttccagatctggtgtttagagcacagattgttggacacccactcttggaggttctgattcaataatttggggcatgacctaataattttcctatctgtaaaattccccagtgagaaccctccttgggaaccactgtagactaccctagattttgaagtaacttgttaaattcccggaccacaggatgggaattctgacagttctgatgtagcaaggacctcaggactctggacttgactattttactagttgccaagtatgttggatatatccttgcttcacaacagtgattctcatatttaattaaatgtaattcatggtaaatctcacattgctagacatttctccttttacccaagtagaaatttagttcttttaactataggaacccttagacagaatatgaacacacacacacacacacagagagacagagacgagagagagagagagagagagagagagagagagagagagagagagagagagaaaacaatccttaagcaagctagactttctgttaattcttacaagtgatgtatatggcctagcttccacagatcagtaaagatgagggtgcctggatccaagttctcttcagtgtgatttttttttttaaaaaaccctctcacattcttttcttttctcctcctcctcatcannnnnnnnnnnnnnnnnnnnnnnnnnnnnnnnnnnnnnnnnnnnnnnnnnnnnnnnnnnnnnnnnnnnnnnnnnnnnnnnnnnnnnnnnnnnnnnnnnnnnnnnnnnnnnnnnnnnnnnnnnnnnnnnnnnnnnnnnnnnnnnnnnnnnnnnnnnnnnnnnnnnnnnnnnnnnnnnnnnnnnnnnnnnnnnnnnnnnnnnnnnnnnnnnnnnnnnnnnnnnnnnnnnnnnnnnnnnnnnnnnnnnnnnnnnnnnnnnnnnnnnnnnnnnnnnnnnnnnnnnnnnnnnnnnnnnnnnnnnnnnnnnnnnnnnnnnnnnnnnnnnnnnnnnnnnncacaggctccgttccaacattcctttaaagggcccagttattatcacacgcctggtaaacactcaccaggatctgttttgtgtcttaatttggagagattttggtgtgaggagacccagcagtacaagactttttctcttgcttcttcttcttggtcctctgtctagtttccttcagttcctcagtcttactcaggaacacagtctacctcatctgagaatctctttcatagtaggctggcctggctggttcgagggcaacctccacatcctttctcaccagctggcctcataatttttgtaatgtttctcttactggaatctggggctcacagattaggccgtgctgactgccagggacactctgggagccacctcccatgtctgggattgcaggaatgcatcaccacagccagctctgaagtgggtgctagggactgaactcaggtcctcatgcaaggcaagtatgtcaccagtggagtcttcccatgtcacctttttggttcttgtagcttttactccgtcagcatttctgaggagtcagacaacttttacagatggcactgtgcaattcttagaaattagttggaaagcctgcagttctctctccttggcaaacaaaggttctgtttatgtagtctgtgggtttcatccattttcttagagtaggttgctatcaggctcttacgtgcctcatagtagtcctctaattaagcacgtgcgcaatgacaaggtgttcagtggagacagctattcagactagagttaatcgggagctagagctactactgtgcatttaaatcagacactaacagtgtttgaggagtccttagtaattttatttttatttccgttattttataaagattataatgttaagttcagttattcataatcaatctgcttttataaatctcagggaaattatatgctttttctgatgaattcgcctgttgatactatgttgatagttttccccagtaaaccggtttgaggatctgataaagtctgtaactcctaaccctgtgaccatataaggtgccatacaaaatcagctccaacttcagggtagggttcagtgtcatttgctccaaagtcaggaatgtaggcctttggtgaaggccacagcgtcctctgggagggagggcctcgcctgtctactgagtgcagccctgctgggtgtgtccccttaggtgctgtgcatggagcaggaggaatgtggacaattttttcttgccaccacttcttatgtgttatgatgtagctatttatgtagcattgatattgcattaggtattttgagcaatccacatgactacaggaaaggtccttaggttctcagcaagtatgacagcaatttatagaagacgtttgaatgcccatgtgtcactggtgttaggacctgtattttgtagaccctgagaaacagcctctcggatctatctcatgggtcagtgtgaaggccaattcactgaaggaataaaatgaccagaaacttcctggcacacgaggagtgtgacagcacatcaacatcatggctatgagtcgtgtcctagctgatgaattaatatttcgattctaattcttcagtcagttttaaatttaaaaagataatcgacactaactggatagttagcttttgccaagcagagtgccaggctttatagatgaagaaaatattttttggggggtagcaaatttggatgctgtgtaaatattaacatgggctacctttccctgttgggtacccagagaaggaaggactacagctttgtgagttttttgtttgtttgtttgtttttgtttttaaatgagttgattattaaaaacctggaatgctgccaggtggtggaggttgaggcaaggtggatggatatctgtgagttcaaggccagcctggtctgcagaatgagttcaaagccagtcagggctacacagagaaaccctgtctcagaaaaccaaaaccaaccaatcaaccaagcacacactgcttgctagttgctttggtcctcccagtcctcagctcccgagctgcctctgggcagagaatgtgactttaggcctccacatgctcccttctcactcagacactgctgtttccggaaggcatggacgaggcaccagctcgcagtgctgtcagcctccgggtctcaccctctccacaggtctcacggacagatgtcccctcagcctgtccagtagtcagctgccacttgctgatggcagatgtctgtgtgagaacgccactgtgaatattattgaaactcatcaggaagaagcactgtgggccacactggcctgcctacctttcctcgtgggtatctaaatctggaaaagaattgttcccttgaattcagagaaactaactagtgtttggagcacatatcctttgaattcattgatatgcatgtgtacatgtgttagtgtgtgtgtaaaaacatcaatacttttatatatcatttttaagagaacatggttttaactgaagctaaaaattggactggctttaggatcagtaaaaatccattgggctttctttggtcatgcgatctttctatgagctagaggaattttggagcaggatacatggaagaattcagtgacaaacaggagacatgactgagctactcagcattgcccacttaggtggtctccattcatctacatcctacatcttgtattttcttagtccatccttcccccatcttcctccctgaactgaacccagggctcatacattgtaattctgttacactctagcccatcctgttgtctgaaaataaactccaaacaccttttagaaagattttttatttttatcttatgtccttgagacacatttgtgtatgtctaccatgtgcaagcccgatgctcacagagtcacaggtaggtagttagaagctgccatggctgcttagaactgaacccagttctatgcaaaatcagccagtgcttttaatggctgaaccaacaactctgcagccgccggccaatagtttttacattgtacatttctggttatttccctctgcctctttcgcccttctttttttcttgttttgttatgtcctcctcaattggaggagctgagtcatgtgattcccagtgtgagatattccgtttgagtccctcagcttgttcctcagacctttcaatttgttattaaaacatcattgttgtgtgtctgatgtgtttgtgatctgtggcgtgaatgtggtagagatcacacgtagagatcggagtatagctttgtggagtctgctctctctgtgggtttcagggatggaacttaagtcattactcttcagaacaagttactttaaccgctaaaccatgccaatggcccatctaaagcataattaaaatgaaaaggttgatagtttgatctaatgagttagtaggttctttgcaggctttgattgttgctttgtagacttggggacctggtgtccttcagggccgccattgctgatctctgcagtcttcttcctcggcttccagtttatttttagtacatcttttcacggtcgtcttttttctttaatacagtagcagacagcaaactgtgtctagtagcacgttgctcctaggcagtgtagctgctaacgggatgtgtattcctggacatgagccaagttgtgcttcactctgtgtgtttgtcctcatgctctttattttggtgttggggtgtgagccccaagaacccatgccagccacttacctggctgctgctcgttatgctgggctctgggaatccaggaggacagcagccttctcctgaggaaatcgttactgtgggagagccagttctgttgatggcccacgtgaactgtctcggtgttttggaaatcctttcagcaggattctgtgggcagcatagacatccccctggatgcaggatgcaggatggagagatctggggtttagaggtggagggagcagccctttgaggcccagtgagaccaggacttgtaagggataatgttgaacacagctattgggggtcagctacctgagggcatgaagaactgttttccacacaccatggatgctgtttccataggaacaaggaagcatttccagaattatcacattgaatattctataggccttgaagtgggcatgaggccgtaatatagggtgcccaatagacaggggctctagctagcaagatgaaggatgaacaagatatgtgttggggttgaggtatatgaggtgtgcatggtcacaggggaattaaccgatgtgtaagctgcctaagacccagttgggaggtaaggcctgaagtagaaggagcagatagaggcttccaagtcatatgtggacatggagggtgaacttccctatgtgtttccatgttaaaggagagaagtggatggttggtcagtgtgggctcagtgtgggcacttggaacaaaaggtggagggaccagcttgaagtcactggcctctgtgcctggcttccctcaggccttagctacgtaatgatggaagagagagaaggcttcaccatgcagcagtctttaagctctctgtttctgcaatcagctgtagaaagttcctgcccatcactttagagactgcagcacatgagtgcatatgagggccataaaggagctgtcctatagaaggagggtgttgcaaagcctcttaggaaggtcagcttcccttggtgctgtttcctgtagcggctccctagggtggtgaggggtgtgtgccctttgggaaagaataccttcaatttctttatctggaaacgtgaagtttcttcacagggctcatctcccaggacctgcggtctgccctgggcctgtggagtgtcttcactgccccagtgagatgccataggccaaggagattggtttaactggtggtggcagtttctaaagtagggagacagaggaagcaagagattctggccagggtgacacaggaattaggaagctgctcatttttcctgcactcagaatgttaaagagacagtccccctcccgctgtgcgcgtgggcaacccttgtcccatcatggggcatctccaggtcctccttctcacccccaccccacctcccaaattgctttatgtttcttttcttttcttttcttttcttttcttttcttttctttgtttttgtttttgttctgttttgtgtagccctggctgtcctggaactcactttgtagaccaggctggcctcgaactcagaaatccgccggcctctgcctcccaagtgctgggattaaaggcgtgcaccaccaccgcccggctgctttatgtttccattcctggctctccattgagccgtgaaacctacaggctgctctttgagtgtgtccctgtccatctcctgctgagtcctgtgttgttgtgactgctctcctcctcctcctcctcctcctccatatcccattccctttggtttatagtctgtattcattgttttggtgatggtgccggggcagtacctctctctccactgtgctaacttggctactttttatattgcgttagatattgtaacgctagcataaacatcttgttcctgttgttccataatgatggactggagtgtaaattgccacttcctttgttaagagcactttgctagcatctgtcagtgttcatcctatcaggcctgtgatggattcccactagtggagaatagtgctattgggatatttcacatgaaatatatatgcatagagttgcttactgtaatgctgtaggaagcaaagccgggaaacaacatgaatgtacatcagtatgggtactgtgaagggactgaaagccggctcatctacagaaagcattttccagctgtaaataaagggaaaataatgtaaacgttcaacttgtaatttgtacccagcgaacaactaaggagagatggattattttaaaacataagaagtgtagtacccccgtggaggaaggggaactaggaaggacgccatcttttactcttcatctctatcttttgaaccactccggcttccttccctcccctacaggccttttctttcccagagctagaaaacaagtggcttatgtcctagatcctcattttagcttttccttcactcttttcattgattgtgtggtttcacatgcatccccagtcctgctcggctcctcgatcaccctctgccttctgcccttgcaacctcctccccaaaagcaataaaagataatgccaatatcaatgcctatgcaaacaaacaagcaaacaaacaaaacacaaaacatagaaaacacttcattgtggaagctgtactggtgtcacagtgtgtcccccagtactgcagtgtgtcacagtgtgtccccctctgtacacacatcttcacttgcaaatgttcattgtgatgagttattggtctggcttctgtgacagcatcaatattggatcttccctgggcttcctctgggttctgctgttgctgccctggggcatggagatcctgcagctttgaatcagtaggactggcccttccatgcatcccaacctcttgaagatgatagagattttggggttgccaacacagagccctggatctgggcctgggtggtagttgagctggtcagcatgttggttcttccttatccacagggtgggcactcaagcattgactggtctggctaggccacccagtgccaccattggcaggaggcaggtcagctcttccaactacggggtggaggaatcgcctctgcacctaacccatctcacagcagataagtgaggagtggctgggccagctccactgcactctccactgagacttaaagtaagctggggtcctgctgtgttcagctgaccttgcctcatgttataatatgacagtgtccccaacaaatggagtggtccatctcacgcattcagtcatggactccgattatcagatactcaaaggttctgagtctgtgtcgttggccctgtccatccatgttgtatgtaagcttccagctatttctgattcattatctgaagatgcttcagaacccatcttttgttacgtctgtaggtgggaggagggagcattcagacatcacagaccacattcctgcacttggttcttgtgtactgtggaattgtcgtgagacatttgtttttgaagagccttgactttttatgtggttggcagataaatttattgagtgttcatatgtatatactgccttagaattataaagatggcaatgatttttttcaaatataaatctgtgcttttaaaaatatatgaaatataatgctaaatgtattttcctgatattggcattaccttttattgcttattgagttatgtttagttacttgaggtaacaagtgcttgctgaagagtagcaacagtttagtgaattaagggatagacagacagggccttgctgtgtagtagccctgtctgtctgcttttgaactcacaatcctcttgcctcagcttctgtctttattatggtccctctgcatatgatcttttccttttcatttaacttttattgattctttctgaatttcatgtcatgcaccccagttccctcctctgcctgtcccttcccacccccaccccctttgctcttgcaacctccctgccaagctgtgactgtcacagtgtgttctgcacttccttacatctgcacaggatctttaggagagggctgtcgcccacagttcagtcagcccttacagtcaaacaccacctgcggcagaacaaactctgttcagccaatctcatgaaattggatttttattttattcccaactgtatttagtttctgtggttagaaatagtagttgaaattgtggtggaatctgatggttttgaccatttaaagccttaagagtgacttgcaaggctatggtgtttctgacggtgtttggctgtggcttcctggctgcttgttttataggcacttttgtagttgaagaagggtgggctcccaggcactctgcactctgctgtgggagcagggctttctcattttcttgcccagtgtcaggcaaccctgcacctctctgctgtctctggggcagggtggaggaccttgaatgccgcctcttgccccacttgatttgaaattctggctgctgctctcagggaactttggggcatatagcagggcacacttcgacaagcagaaatctgatttgtgtgtgtggggggagggattaaggtgataataatctaccaactcctactcagcccccacaaaccaaagtgtcaccctcagcaagcagccggattgtagagctgtggctgtggtggttgggtggcaggtgtcactcccacctcctcatgatgtggctcccaggtaaacccaggcaaccacaggggagccagtctggaagggtgggtattagataccacacgaacagactaagggcctggcttgctacagcttcttagttttgttggagatctttctaagagtctgtggaatgctgttctcgggcattcacctttatcttagagccagtttaaagacagcttgcactgacccttggctggtgctggctggtgaaatccagtttgtgtagctcatagatttttcagtaccagctcttggcttaagaagcccaagaatttgtagtgtgttctgtgtgagaatggggtggggcaggtgcttcttagagaattttactaataaacactaatttccatgtactagttaataaactaaaactagtatatggttctttagggcctatgtgagctgcctgagagagggagaacattttacttggtggtaggagtttcccattctttttatttcccctctcccattagaaactggttcttcagctttcagagccaagtaagaagctatgcactaggctcttagcctctggcctctctttggctccagtgagcatgtattaagtagccaagacctgctatgtagggtctgtgaggtggagcagcatttggactgtgtgctgtttcaacagaataccagacctcgcagcctggagagagttgaaggaaaggcaaggctgagtttctcagctctggcaggcaggcaggcaggcaggcaggtgttttgtattttgtccctccacccccactggcttttgttctttaatgtggttttctaaagatgacaccacataggcttgtgggattttccgcacctgggtgttggttggttttctaaaaactcataccgttctgtgggtattgaggagggcattttaagattcagctattaataatgtcattaattattttttaaaattgaaataatatttgaccaaaatcatagttcagctatacaaatgtgtggctcacccctgtaatcccagcacttggaagggtgagctaggaggattataacaaattcaaggccagcctgggctagcactgagacggtccccacacgttggaataattaagcaatatatcccagtttaggattaggtaatacagtgagctttggctttggtttgccctgcatggtgacaactcatttctggtccacaaaactgcagtcccatgatgcagtctcatatccaatgtgcctgctcttatttatttctgtcattgattcatcactgtttgtgcttttgataaagtattaaatgacagctgccacatgtttaattgttggcaaaaatgtaacgtcacttgatatttaatcatggtcagctcttgtttcattttgtctactgtatgaagcctaacacttggagatactgatgaaggattgtgtgtttgtgtttgtctaggacatgtctcaagaaggctatggaactagatctcagcctcctctggcccctggaaaatccaaccatgaagacttgaatttaattcaacaggaaagaccatcgagtctaccagtaagacattactatgctgattggaaaatgtaatgggttaaaggattctgcaaacgattgttttgcctgctctgttttatattacacacaggagagaactttctaagtgtcagatttatttaagaactgttagctgttaggattctttcttgagagccaacactaagctctgagcaaagctaccttggcagtgtccacttctgtagctctcagtcatccagctctccttgctgctgtgtgggtttagatgtactgggatatcaattattgacgaagcttggcatatagcatgtaatgtaaaaattatcctgaagctctccctctgttaggacattagcatttgagtatactctagttttctttgctcatgaagcatgcgtgccaggaaaagacaggctggaaggtctgttacagcaaaccctgtagagtatatactctgttattttgcagatcttgggtgtatctcaatttgtagtgtggtgaagtgcactggcccctgagtgttctgcagacctgtttctcgtaacactcgccaatgctttcatcacagttgctatggttaccttgactccttggtttagaccctgatccttttatataaaacgttttttaaaacccaccactggtttctagctgttcatgttatcacttggggattgttctcaggggattgaattggcctcaagaaagtctgtgtcctttctaggctaatgacaccagctgatggtgtaggtatgacacctacattggcagaacttgtcattctcaaaaccattttgttttcttcacatgtgctttcccatggtggtcttgagtttctagagaagaagtggacaatctgaacagttaggcaaacagtagctcgagggttcttttcttagtaatatacacttttgcttgtgaaaaagtgactgacaaacactaatcattgtaacttgagccacttgaatgcagaatgcatgttcttagtaaaatactaatgagtgtataaaagggagtaattgaaaaaaaaagaaggctctccttttttcttcttcaaaaaaccaatgtctgtcttcttagacgtggagagagccatctctgtgctccagattggaaagagccactttgttgaacctgtccccaaaccccaggtagatgggggtcacagttctttctgcttatccaagctcactgtgcctgccctgctctgatagtacttgggaggaggcacagtggtgggcactggggtagatttgtaaattggctattttggaagttccctcacgtcattaaaacccgattcctgaccccatcttcctcaagcagaaaagtcgggagattgacgtgcaaagagttggattttccacagtcagctaaacagtgctgtgtccctctgtggagttgccctttttgaagggagtggggtactcaaggctgatagttcttacagtagcgggtcttaaaccggacagtagatgccttacagagaatgctgaatacctgttattatccaaaaatacaccttagggataaagtatcagcctgaaagtcctgcctttaaggaaagagtctggtttgtctgtgttcactttagtctttgataacatcagctgttattaggggctgtgcgttttgaaaacgagaacattgctgttaggctaatggtgcagtgcagttaaaatccatgaatttaatactatggttcctttgatgattggaaaccagtgagggaacacagagaagcagtcacttagctgggtcctgatttcctagttttcagcgcagccctaagcctatctcaacctgttggcaggtttctgcagaatttaagtctaccagacgaatggctgctgggtgaactctttggaaagttttttgtttgtagcttgaacttgatttaaatggttgtcatgaaaaggttaagagtgtagctgtcttacattgattgatccttctcaaatcattttaaatgctttaaaaaattacaagttaatgaaagagaaatcttatgtgtcttcacatagctctgagagttcaggcatggttacttcttgttagcagtttgcttagtgttcctaagtgtcagtagccttacactgtcagcagggttacagagttccaggggaggcactgtacagggtgggggctccccagggtaggtggggtcccctaggcagtgtgccctgtgggtggttcctctgccattgtaacttttgcagaaattagccatcattgggccaatttcaaactaaagatatgaacatagttttgatgtcctgggaaactggaaaagggacacatggctttttgtgttttacaatgtaatgttcttactggagaggctaatgtgccacccagacatcgcattccctcagaccgggagagcaggaagagacaccatgactgtccttcctggggtccccatggccctgttggtcatgtcagagcgagaagatagagctgagcaaggcggcaagtgtttgtctcctttcttccaaaacagcatcccacttaaatatggattctgtaaatgaaaattcagttaagacttgaacagtttagacttcttccatgaaaagaaaagcctaaatacaatggaaagcttgaataagggaatattttaaaagaactgtagcctgcttttaaagcactaaaatgcttgtgcacccagtgtttcctgactgacttcttcagtctggtaaaataaatggaaatttctttacctttaactttatttacttggttagtttgggaaagcacccagagccttgtgctcactctgctgtctgttacctaaattcacttccccaaagtagggaggttcaaactcggtgtagccaaggcatttgcttagggacagctcattgactttcaaaaacttgtttcaattttaaaaacagatttctaactaagtttactttctgcaaactttctcatctaacattctgaagatttccgtttaacatgtgggggaaatgaatttcagcccattctgtagggctgtcaattagttcttgaaaagttaacggaggactatgggaatgctgtaaaaatagactggccaagccagaggcttcgaagggctgggacataactgatttgcaggatattggttttgataatagaaggatagtgatgatctatagttgataaatgaagctcattaagtaagggatgataaatgcatacactcctgattaatagaaacatctgcgcacaagatctactctgcttacggctctctgctgacctgggtggggccctggagcctttctgtggcttgacctagctgtccaggatgcaggcatgtcccagagtcacccccacagccctaagccactgtgcctgacatcttctctgaccggcgggtgagttggggatgggaggcagaggaggcagagcaggaacttgagccatcaaccagcctgaagatgaggtggcaggcaggtctctgtgttctgagcatgtgcccagagcctgaacttgagcaggtatgcagagcctcaggacacattacagtggttattttccttccttgtatgaggatctgtgattctcaggacctatcacaccctttcctgctgtcttggttttggccgtggtacccacagggcgagtgccacaccctcgccctgcctccaggccgggtgatgttgtccagtgggacagcaagggtgcttggcttcgtattatcctactttactgggaaatggctctcactttacagattgtcactttgcaggtgatgagaaggcacacatctgtttgctgtaacagggacatgtgaccagcaggcactcacactagcatccgtgcactggttactagtatttatgtttttttggatctagaagtaactattcttaatattaactgtcagtttaagagttggaataaatagaaggttcccccaaccaaaatcttcttttcttttgccacagtgcatatgactttagagcgtgctccgcgcccccccccccctcatctttttctttttgccttctctaaattgttgtaaaataactgaatggtcttgttttcctttgtttgggtcaagaaattttagctgaaaattgttactgtgtgaaagaagattattgactcaacaagccttcaattttccatgaataacactcccacccctagcttcgggtgcacgctgcgcatgcattctattttaaaatacagtctgtaatttaaaacaggcagttggatgccccactgaactttgtttaagcctggaataaaagagagagaaaagctttaagccgcaaaaaggtggctaagcctcctcaactgcttgtctttctaatgcatccatcctgttaaagagcgaagcttgcaggtaatgttgccagctggtgccacagctggtttcgcccagtttcaggctgtgctgtggagatctagtcgcttgtttccaagaccccaggagtgtccattggcactagccagtgtgtatgtgcttacacatatggtagttcaatgcatgtgtgaatattatttctgatattaattagttaattaatttttttcaaggcagggtttttctgtgtagccccggctgtccaggaactcaatctgtagaccagtctggcctcaagcgcagagatcctcctgcctctgccgcttgagttcaatgattaaaggcctgtgccttcaccacctggctctgattctaaatgagtaattttggcaatcatttgttataaggtagctactgttgtgttggtgttatataaaatggctttaggacacaaatgttgaccactggactgtttgctttctgagatttagaaagtgctcgcttggaagtagcgtgcatctttcaccttctcttccttacagaaacgaccaacttgccatgactcgtatggaaggcacgctctgtcaggggacctgcttgtgccagtgtttcgtggcctcagcccagctctgctcttgagtagctaagccatgctgcctcagggtgattgcttctcctctctggaaaatgacttctgtagactgagttgcctcaaaacacccttgatctccttcatggtcactgtaggccttttctgttagtatttaagaaagagcaatagagctgaactctcttccctccttacagagcagagcgtcaggtgcgtgaggtgagtctgcaggaggccctctgtgtggctcctactgcccctcatcctccatcctggtgccctttatatttttgtgaagggaaacatgggctttatttaggaactttggccaccaaagagcctagaccttgtttggccttttattaccagagacatgtagcagctcagaggctcccgctgtgccctgcttatgtgattcgtgtggtagtctttcttgggcaggagtacaggacgtctaggggaaaggcaagtccaggagaaagaagagaagcaagaacacctgtcggtcaccgtctccgcaggcctgctatacagtgcagggtggaaagcggttcaggagcaggctgcaggactcaagtcgtgtgcgctcgtgtgggtgtgcatgtgcgtgtgtgtaggccaagaatgtctccctgcactgggcaaaagggcagccagccttgtgaagcaagacagtctgtgttctctgaactcttcactcctttctaatgttgccaagtttattacatgtgctgttaaagttaccaaataaatactttgtttctacaaagattttagattttgatttgggaagtacagtgagtgtgttaccagtctttctgcttatctttactaatttttgctttctggcatgcgttgcgccatgacatggtgagcatccactgtaaagtaggccagacagagtgagtcacagtccaccaagggaaggtaacagcttcctgctaccccaccctccatctctgtgcactcttcagtgtccctaatgctgtgatgcggacagggtctttcctagtctttatttccccactgctgctgttgcctgcctaggagcagtgccagcccctgctcagcactgggggtcgggttgagcttttgtagttggctgctctggagtaaggctgccgtcaggtagtaacccagcaccttctgaggactgttttcaacaggcttacttgggagcgggcgcttcagtcaaagaattgcatgcactgctaataaaagaagagtcactgccctgggaggggccatgagctggaaagatgcctcccagggctctcagggtttctgtggctggacagcatggccctccccacagagtaatagtaaagccgttagctgttaggtgtcttcgtgggctgtctcactgactttgcttctaggatggcacagtgtgtgtttttaagaaatgtgatcccaggcgtggtggcacactggcacacgcctttaatcccagcactcgggaggcagaggcaggtggatttctgagttcgaggccagcctggtctacagagtgagttccaggacagccagggctacacagagaaaccctgtctcaaaaaacgaaagaaagaaagaaagaaagaaagaaagaaagaaagaaagaaagaaaggaagaaaggaagaaaggaagaaaggaaggaaggaaggaagaaagaaagatgaatgacagcaattttattctccagtggacatagattcctttgcattactcaatttgatatacttttgactgattgactgatttttgcctattttggaagaatatttcttagtttaatttgcttcaaattcctcttccctgaatgaatatatttttcgatgtatgcatttgtggacctagaatataattgtcttttttccttatggagggttcaagtgacagagaacttgattttttttttagcatgaaattttcagaagatgttctcttttagtctgtagaaaaggctaccccgttgagcagcgtgaattcagttgtacatttaaagtcctgcaaaggacatggtgcctgaagagattcttctcaacgctgcagatgtccttgctcttcctggccagggatacagctccacagcggagcagtttctcaccccgttgtacaaggtccaaggttagcgctccatccggactcaggaggggggagagctctccaccccagcccccaccggtgtcttcattctacaccaagcctctgcctgttgttccccaggggaacaggggcctttgctttagacatgcactggtttgggtttagtggactttttttttggttggttggtttttgtttttgtttttgttttatgctgttttaaatgctgttttatgagctaaacccggaacacattatagtctccaaagataattaacaaagcaaaacaggattaatattaaccagtttacatgtgtgcattttatgtatttaatttgattcagattttgtctgctttgagctcaaattcccagatgtggaaatagaaagtggcccgtggtcggctggccgacgcagtagcctcacttcagtccgctgcccatctctggcagctccgcccagctccaggcttcacaggttaccacgtgctgccctgccggcttcacactcacaatggggtgagctccctttgaagtgcaactattttgcccaaatattttttgagtaactccccttgccccttaggcttttcttagcatccctgtatgttgacatcttcaaatagggtacagactcactctcagaaattaaattacatttaacaattaatgattacttcttatgcctaaatgggtgtattagatgtaaaaataacaaaagaaataaattaaagttttaattatttcagtagtttcttatgagtgtcactagtatattattttgagacagggtctggtctcattgtgaagtccaggaccacttaaactcagaggactgcctgcctcagcctctctgctgctgagaggtgtagccatgtgccactgtgccttggttaaaattcgtttttttttttttttttttttttaactataacatcttccattgtaagcagtcaacaggggtacttaatattctttattgctaactaatatctacatacagttctagaattctcctttagcctcgcgattttgctgttttatcgaagtttccactgtttagcagtctaagcaaggctgcagggatgttctgccttaagctctctttggacagtgctgtgacactcctgtgcccatgctggctctagggaggacacggcacacgccctttgggttgagctcctcgtcttcctgtgagctacaggagcaccagctctcttggcagacttcttcagatatcttgattattgttacttggttgactttttaaacataaagacaggctattaaattcctacccatctttgatacattatggtcagtttggggttaatgatttttaactgtgtgttcaagctgaccttggtgatgccatctgtaggtctagctaccgtggattccacagcagggttgtttgaactcaggagttcaagaccaacttgaccaaacatagttaaggttgacaaaacattcatcattcatgcaagtacgttcagtaactttatggcctagagacttcatcttcaaccctttacatgtgtgtgcggcacaacacatacagatcctcactaaaacacgtcagtctatgcgcccccaccccacccccaccccgctttgcactcggagcctggggtccgtggctcaccaggcctttgaagcaggagtgcctctgccgaggcgggcaggtgcactgtgagcctgctgcctcagccctggtccctgacgccaagccccttgtgcatggctgtgtgagttctgcagtatggagcctgctgcgactcctcatttcagtgaggcttgttcacacagaaggaaagatgagacgaatgtagctggagattttatgataaaataaaaattcccacagacttggacttcctcttccttccttgttggactaccaaagccaaagtcatgtttgatcgggagcaactgataaagaggccaaaccctttagggttcacgtcataaactagatctgaggagttgcagacgtaggccaggcaggtggcattccaaagtgtcctgctcatccccgtgcccagtgtggtcttcagatgggagttggtgacagagcagcagttgtgacttgagttcacccttctggcttctacagaaagctctagacagcagatctggaggaagcctgagatggcccctcaggcttgcatgcactttcaagctaggcacccagtgctaccccttaattgaaactgcttgtgttgccaggtgacaaaggactgtaatccccacactcatctctaaaattaaaaaaatcacgcatgtgtgtgctcgcaggtatgtatgttcccctgtgcacatatatacgtgtgcaaatacacttggagagaggggaggaaggatatctgttaatagcaatattaaatggtaaccccatgtatgcggtctctgactcttcatcccagctgtttggatgatgataggtaaagccatcactttggggtatccatggcactcacaccttacggttcctcctccgggttctctgctgttccctcagtttcagttatcagtgtttaacacagagaccccatgaagatctggggaagattacagaggaaatgaacatgactgtctttgaagtggacaaacccctgttctcatttttagtggcagcctctggtgtccttggtgtcctgggcagctcagctctgcttttctgttcagctaaagacctaaggtacatacaacagtcggatgtgaaaggtaccataaagacatttcaccctccagatgctgtatttaatacaaagtgcgatccgacgctctaacctaatgctcaaagtctttttctctatggaagtgtatgaaagcggcttgggtgaattttcttgcagctgtccgttactgctttttgcttgagaattagaaagaaatgtgtttattttgtatggatcagtgggcacctttaatggcaagaagcttgctgtgacaaaggaccgggtctcctgtgaggtttgtattcaggctgtgcttctggaaggacttgagttgacctaaagtcacacattcctatgtaaagaaaagctgttctaagacattacaatttgttgggggtggggtaggatggaaaaacaaacgagcccggataatgatgtgaccgcaaatggaggtccagtttaaggctgcgtcccagctaccatggtaaagagagaaattcaaggttatataatttttaatataaaggcaaaattcgttatatcttagggaacttcaccttctatgattttgtagaaggaaatgttctataaagaaacataaaatgatcctgagaaaataatgaaactgatatggaaatagaggcctgttctgtgcagtaagagccgtgatcccatattatttggaagcttataggggtcttgaatgagaccttccggcccacgtgagtggacagggtcctgagtgaggccttaagtcccgcccacgtgatggacagttgaagtcccgcccacgtgatggacagttgaagtcccgcccacgtgatggacagttgaagggttttctagaactcgattgacttgtttaactgtcaaaattataaatctagcaattgtgttcaaaggagtggtttattgagcccatttttatatttcatggaaacttttaaaa

SEQ ID NO: 138 - DNA, 1092 bp, Mus musculus
tttcttcacagggcagcccgatggacccaatggtgatgaagagacctcagttgtatgggatgggtactcacccccactcccagccacagcagagcagcccatacccaggaggctcctacggtcccccaggtgcacagcggtatccccttggcatgcagggccgggctccaggggccctgggaggcttgcagtacccgcagcagcagatgccaccgcagtacggacagcaagctgtgagtggctactgccagcaaggccagcagccatactacaaccagcagccgcagccctcgcacctcccgccccaggcacagtacctgcagccggcggcggcgcagtcccagcagaggtaccagccacagcaggacatgtctcaagaaggctatggaactagatctcagcctcctctggcccctggaaaatccaaccatgaagacttgaatttaattcaacaggaaagaccatcgagtctaccagtaagacattactatgctgattggaaaatgtaatgggttaaaggattctgcaaacgattgttttgcctgctctgttttatattacacacaggagagaactttctaagtgtcagatttatttaagaactgttagctgttaggattctttcttgagagccaacactaagctctgagcaaagctaccttggcagtgtccacttctgtagctctcagtcatccagctctccttgctgctgtgtgggtttagatgtactgggatatcaattattgacgaagcttggcatatagcatgtaatgtaaaaattatcctgaagctctccctctgttaggacattagcatttgagtatactctagttttctttgctcatgaagcatgcgtgccaggaaaagacaggctggaaggtctgttacagcaaaccctgtagagtatatactctgttattttgcagatcttgggtgtatctcaatttgtagtgtggtgaagtgcactggcccctgagtgttctgcagacctgtttctcgtaacactcgccaatgctttcatcacagttgctatggttaccttgactccttggtttagaccctgatccttttatataaaacgttttttaaaac

SEQ ID NO: 139 - protein, 168 aa, Mus musculus
SSQGSPMDPMVMKRPQLYGMGTHPHSQPQQSSPYPGGSYGPPGAQRYPLGMQGRAPGALGGLQYPQQQMPPQYGQQAVSGYCQQGQQPYYNQQPQPSHLPPQAQYLQPAAAQSQQRYQPQQDMSQEGYGTRSQPPLAPGKSNHEDLNLIQQERPSSLPVRHYYADWKM

SEQ ID NO: 140 - DNA, 145985 bp, Homo sapiens
  misc_feature (1)...(145985): n = A,T,C or G
gtgcaaaggaaatgtgaattttattcttgtgcctttgggagtcccatgtcttattttatgctgtctttgagactctttatagtggagtgaagtgatcatcagaggaaactttttatcctactctagggtctgggaacgtgctccagggaacagggtaattatttataaaggtgaggtatagtaacatcatggcgtggtgtaagaatggctcttgtggagaggtagtatggttgagtgtaaaacacactgggtgtccagtgctcattcaagtccttattgatactattttctttatcatcatggttattattattggcattggaagtttctttctgagaccctgaataggttgatgaccacctccttttgagtagtttttgaagtaacatattataaagtggttatatgctcttggaaaaaattattatgtaaaattgcacttgagtgctagcacttgaggtattaagtgaccagctgcccctgtacaaaaatgaaaaacaactcattttggaaacctcttatctaagtgagtctatgaatcataacagaaaataagaaaaatgcatggttttaagtttgacttttgcgggagtactgcatttgttgaatttgattttaaaatataaaaatagtctccataaaacatttccatctgtaatctagttaagctaatcatgtaaaaagtttctgaattctctacttttctaaagcattcagaagtcttaaaaatgattttaatgaaaatatgaaaattttctactaggatacttgcataatttcatatatatcacccaaaatgtttattcttgtctggtttttacatacatccacaaaatttttgatattcttttactaggaggtggagcttaattcccctcccatgagtgtgggctggacttagtgactcccttcatgagtagagtatggacagggaataaagtaacttaacaatggagaaacctggttgacaccaccttaaccaagtgatcaaggctaacatcaccagtggtgagtcatgttgacatcgtcatgttgacctcgtcctccccgctatggtacgatatgaaggacacttcacttctgtggtattttcccccaaaatctgtaagcccagtctcatcatgagaaaacaccaagacatgcaaatgaaggacattttacaaaatacctgacaagtactcttcaactgtgtcaaggaaagactgggaaactgtcacagaatggaggaggctaaggagacacggcgagtcattgtaacatggatggtgggttgggtcctggaacagaaaagggacataagtggcaaagctggaaaaatatgaatgaagtctctggttaacagtgtcgtagtactgttcattttgcagttttgataaatgtgccatgttatgtgaaatgttgctgttagggaaaccggatgaaggatgtaaaggaactctcagtctgaagtcatttcaaaattgaaagttaaaaagttcagtgaaggatgaagaacaaatacattttttcttatggttcatgtgaatgggtagaatatcaaaataaccaagtttagtaatgttctacaagtaaaacttgcctatttttcatagtagactccacacaatttgtgagttgtgtgtttttctgttaggtttttttgtttgtttgttttgtttttttttcctccaggagatgaggtctcactgtgttgcccaggctggaatgcagaggctattcacaggtacaatagtgtcctacagccttgaactcctgggatcaagcaatattcctgcctaatttttttaaagttgctaatttatttacagttcctataaatcttaatgtttataagcattttactgctatactactgaagaaatgaatgtctccagaaggctcatgcctttttattgtgttatttttagagattctgtgtgctaagcattgtacttctaagataaacagtaaagttgttgtgggtttttttttaccatgagagatggaagtggtggtattgatggcttttctgtcctgaagatttattgtaaactttcagttataaaaacaggaatctgtaggcaaagtctgaatcttatatatttacaggtcttgttagtttgtcaatttactttcaaaagcacatgggtcattaatatttataggttcctacctggcaatgatgtttgggaagcaccaacccataaacccatctctctctcttcctcagtggtattaggtgattttttcctttctaactaaataccttgagagtcatcaccagcagttttggagtagaatatagaattaagagactataatctttaagactgtatgttagtcatagtttttagatactgtcaggctgttttaaggttaaggcatatatctttcaactcatgtttttcattgattctcacatggacctgaaatgagtcagatgactatgtcgatccttaaaattattgcaatctagaaaacatgttgctatttaacccagactagagttactcaggcaattttgttgtcattgtgttatttgtttaattctatataatgctaaaaatatacagattttttaaaaagcactttacagatttattcttaaatagtacctgcaattttaattgtgtttaaagtgttcttagtctcttcgttggcacctattgcaaatttttcctcttctaataatattaagactcactttctggacctctgtggctccctggttcctaaaaatgtaggcccctgttccttggcataagcacgtgaggccatgcgcagcctgcctctgccaggctccggagcctcaccctctctcctgggcatcccaagtgccgcctgtgccgaaatgagcatgccctcccctcactcttcctgccctttgtgcctttgtggattgtcccctctgcttcctgtctctttccctgccaagtgccccttcccaccagctgtcctagagtatcctttactcctggtttggaccccagtccctggacatttacccgtcagtctgtcctcttagcacttactaattcaccctccatcatagaattttctgcacttcattgttgtttgtgtggtttgtctctcttcattgagactcaatgatagaaggacattcaagtgtacaagtccacatatgaatataaaatgtcatccacacgtcaacactgccttctccctttttctccacctcctctcacccatcccacagcaccaactacaaaacttagatagggcttgcttaagggtgactctagtacaaaaatacctttcctcacattattcagtatctcacttttttataaagctttaatttcatcagtacactataatttgttttcaaaacatcattgttcctggaataataaagggccagcagttacgcacacgagtctttttcgtgttttagcactgacatggggcttgacttgtgggtaggaagagtcttaagttcgttggacttaagtatgataaaatcagataaaaagcattttaactggtaggaacaatgaaatgccgctaacaagatgctgttattttctcacgtaagaaaatatgcatagtatctggagcacttagacggcccttgatcagtggtggtatcagttgttgctaaagtcagcattctcgtggccataatcatgagcatttctgaggctggtcctgggagtctaaccaagaagggaaacgttacttccagatgaaggtaaatcccagattctatatacccaaaaaaagcttataaatacattttcgtaccaaattatttttgagttctactgcccatactatgttgagaggtctatttgttgttctttctagtctacgtaactcctgagactgttaatagttgaagagtggagaatctcttcaaaagagcttgaaaactgagactattttaggaaccccttgaggcttgtgcagtggggaagaaagatcccttttatgatgcatatttcatacttgcattgtttaccacttctaagtttaggatggcaacatgttccatatcaggagttttaacccaaggacctttgagaacagcttttattttagatgctgatttttaaataccaaagaaaatgtaaccattacaatgatatttatctaaaatggtatgcctaactcagaattttgcttttgtaaagtgtcaatttagctgattatcctacaaatgtcccccttaaaatgagagttacccataatggaatctttgcctgagaaataacacaaacgtatcaggtgaaagtcatgtcacccaaaagtagttcttggccacccctcttaaagtgaattttggctcattagtttttcttgtgttatctctggcttttgatacggatttttggagcttagaactaattttaaattaacatcaacctttttttccagctgacctcgtacatcttaagggtgtgtactgtacatactgtcacataatgagaaaataaatacatatttggacatgattaaataaaaagcgacacatgtataacttggaaagaggatgctcttaaggcctaacaattagtgcttggcagattttttttccagggattctgtttttctggtgcctttgctttattttttaatgtggtctaagataggaagtctgagcttttaactcatttgctgtctagacaaatgaaagcagcagggactttggtaggtatctggacataaacactattacaacacaggttaatgcaagaaaaagcctttaaacatcatggaaattaaacagtcactgtgagaattttccttttgtgtgtatgtgtctgtcaatttattgactcaattctcatatcaatttcaaggtgtattcatatcacgtgaccaaaaatgatagttgtgaaataagggtggaagatgtgaagtaattttacagtgtgtttctaaagaaccaagaatctaatgacactggatacttgacatccaggatgttaattagaaacagagggctgataattcattgctaagttttaatagctaagtcaatagttttcagtagagcatttatggtaaatatttagaaatatttgcatgtgctggattactttctatagtgtttgcagctgtatttttctgtagagcttataaatttagtgatatttaccgatgaacaatcatatccattttgtctttagcaccgcacttggcacaagaagtcactacccttaagaaggtgagggtgtagttgaagagagaaaaagaaaaagaaaaagtacacggttttatttcattttaatattctaaaaaggagaagagacactacttctgctttttaagataattaagagactttttttgaagaccactgaactggcgttttaacctgtgctttaaacccatgggaagtcacagtgagaaatcattaactgtatcctattaaaatccttaaacaagagacctgaactggtctcattgattgaaatatcttctctatttctgattcagtgtttatcctcatgctctcctggggcacttctgagcaagagatgcccaaatgtgtgcagtgcttggcagctttctatgagcggctgatctaataccatcagctaattgtattgagaaccatagcttagagtattttcatttgctttttaaaaaacccacttatttaattaagcaagggagtaaaattttctgacttattcccagttctctgagaaagtaaagccaccagtattgactgaatttatcctttggtgagctaacttacgctaaattgaataccatcaaaaccaaatatgtcttttgatgtgtagcaagtcgtcatgtagtaatgtaaaatatttttaggaaggatcatgtacaatctgtaggcatgagagagtctttatacttaatatctatttcaattatctgcagattttaaaaaatccttcccatgcatcttctttgtgggatgtcccatctttattccttctgacgctgccctccctgagcctgccccaacatagagaatctgaacatattcatgctgcatgttaatttgtgaatgtttctcttgtcaaagtctgataagattgttattgctttgggtggcatttcattctaagcacagtgaaatctcttgtacttgtcactagggttagaatgaaaattttacatgggcagagagacagtggaaggatgatggttacagagggagagtcattgcagggaactgtcatttaaattaagttttaaagctaaacagcttcatgattttggtttttgaaggcagggattttaaaaaattaatcatcgatagtagaagttaagttatttttggtgtgccagaaagtaatcagtattccgagtgatgtcagttactgaaaacccaacttaatagcaagatttcaccaaatcacatgatgatagcaaaatagtgattttactatgcttgagagcccatgaagtcattgccttgccaatcaccccatcacaaaaagaggactgatttatggaatgccatggggcaggaggactctcctagccccttaaaagagactgcctgcaattacctcacctgccagctttccagcaagataaatggaagcactgtagcttgaaggtgccttgggtagaatgagatgcagtaaggtctctctgttctttacaggcatcatagatctgatagtacttataaaagaagaatagagttggtgccctgctgactaaattgtcctctagaggagtattagttacagagcttctttgttaactaggctgaatacttaaaccactgttgaacttcttttattagcatgttttaagatagctctacatacagataccctaacaatctgcagggcgggaatatttctgtataatttacatataaaagtcgcgtgagtgtgtaacagtaatataataattatatctttttattactcttctgttacactgaggtctagtcagcactgaaattctgatgacacatgaacacgaagaaagccactgtttttatatttttctcttgatacttccttgatcagcttgttgaataacagaaatgtttttgatgcctttgcaacctgagtaaagccctcttaatgcccatccgtgtcactttttaaaccataatatggaattttaagggagaatggggatgaaacttgtaggctgtgcagagaattacaagaacttcaaagtaaaatttcagattttatgatgagagatttgcataaaattatttaactacaatagatgatttttcaaaaattaaatctgatttgtcctttctacgtttaacttcatatatagtatgggattttatatcttgttatctaccaggtttttttttctttagagaaacatgaaaagcctatttcctgcctgatggctgttctctgactgccgcttgtttattggtcattgccgtgtggtgggtactgtcagggcctggatatggaggccatcacccatcctgggtttttatgatcccttcaaaaagagtaagattatatggagttgtcactcagtatttttcagggggatgtagtaacggagtaagttcctgttcctgttaaagcttgtaccagtcatgatgtatggtaaagttatggtgcatttcagctgaggcctgtcctaattcctgtttttcccccaaggaataggcaaaggcagtagggatggtgtgagtacacgtggttctttaaatcaggggtcagcaagctttttccgttaagggccagagagtaaatattttcaactttgcagcccctgtggtctctgtcaagacttctgttgttgagtccagtaatcaagttaaatataaagtttcaccagctgaatatgtacaaaaccatgcatctcacgtgcccttacatttctgctaatcataaggattagcataaatgtttatatacctttgaattctaacaatcggattgaatttacttaattttattttggattttttctggaactgcatctcaccgtgtcacctaggctggagtgcagtggctgctcacaggtacacttgtagctcactgtagccttgaactcctgggctcaagcactcctcctgcctcagcttcccgagtagctgggaccacaggctgtgccatcactccaggcttctgttttggagatttgatgaactttttctaggggtgctgtttgcagtctgctctgttgctgttctgttgtttcccataagcacagtcattggacattgaagattttgtggaatgaagacgttttctgttttacttagaaagatattcttcttagcagaagacattttgtttttctatagcatttctctttttgattaggttctgtcaggtatactttagaatatgatttttaaagagaagttaattatatgctataacagatgcttaccagataaactaaactatccagggtactaggatcctaatcctgagtttgctttgtgacgtttcaggaaaccctgaagagctataaccagctctgatttcccttgcttttttttgtactttctggtctaggtttactcttagaatcttagcattttcctctgccagattctaaagccctattctcagaagtcccagttgcaagcagtgaggtaaaatttaacattgataaaatttagagggtggagatctattaggattgaatatgctttgtaaacagtagcataaccagatatttctgactccattctatagtatgtagtcttcagttatcaggacaagtatcttttatgctgtaactcagccttgagaactcattggcacattgctcggtcagtgatctgggagtccagtcattgcaacggggatgcactgagcacctgctgatgggggcctccatgggagccatggggggcacaccagtgatgcaggctgaagtaaaggctttgtctgcgtcctcttctgctgagggagcagaagacagtttcttcttcctcctctctcatcttccccttttcgtctttagcacctacagtctgtcctcagtaacgtaaccttcaacagtaacttggactctctgagcttccattgttttgtatctgtatcaatggggtttttaatcactgcctcagagagtatggtgataaaatatagatggcattgacggtgaaaaactggtattaaaaagtaagatataacattaggacccatttctgccaacataacttcaaagacatttattttcacaatatcatatataaatacacacattattattttcttttaatggcactttattgtaagaatttctcggccaggcacagtggctcatgccagtaatcccagcactttgggaggctgcggcaggcagattgcctgaggtcaggagttcgagaccagcctggccaacatggtgaaaccccgtctctattaaaaatacaaaaattagccaggtgtggtggcaggtgcctgtaatcccagctactagggaggctgaggcaggagaatcgcttgaacccaggatgcagagcttgcagtgagccaagatcgcgccattacactccagcctgggcgacaagagtgagacttcatcaccccccccccaaaaaaaaaaaaactttctcatcacaaagtttggtcaaaattgtgactgctattacattacaatatcctagtttgaaattcacgtagtccaccaatgtcaaattctgaaaaaaaggactcaaagcctgtagttttttactttatgaagtaatcatttaagaaccagcattccattcctatggtaagtcaccaggcagagtgctgtctgtgttgtgtggcattttgaacaggtctaatggactcggtgctgacagctgaagggcaaactgtatggggatggttttatcaaagagaagtacaactttactcattttttaggagagaggcaagatcttattggttcaacttacaaatgacctcattaaaatctaataaaaagtggccatgcttttttattttgggtgttacccagaaaaccttcatctctgaaggggacgtcattatgattttcaagtcgtcttttgatgagatattcatccaaacgtgtcactctataaatacatcttttcctttcttaggatctgtctggctccattgatgacctccccacgggaacggaagcaactttgagctcagcagtcagtgcatccgggtccacgagcagccaaggggatcagagcaacccggcgcagtcgcctttctccccacatgcgtcccctcatctctccagcatcccggggggcccatctccctctcctgttggctctcctgtaggaagcaaccagtctcgatctggcccaatctctcctgcaagtatcccaggtatttactttcctgacaattattattttactttgtgataaagagagatttcatgttcatcaacagtaactcacattactttactatttaaaacctagtggccacatattaagagtataactgaattctcaccaaggcatacgagagtcccagttcctaaagatattcaacaggtgattataactacccctttaataaaatgaccaattactttgataatttcaatttgcatatttaccttaacttatgccagaaacagggtattatttatcctcttagcatatgttttgtaatgattctgttacatcagagcttctgttgatgagtgccactaaagtgagattgttgatgaggattggccttatttttttgtggttctattcaatacttgccacagcatttattttctaaaacatttctacggtctatacttatcagtgtctgatcacatgcaggcactggtcaaggtggagcatggtcgaggcgttcttactgatacaaactcgtgccttctcttggacacaaggagcccatgttctggttaactctgtgttcatttatttcacttgtcatgcatcgcctctatcttctccctttattatgttctcgaggttatttatttggttatttatttgtcagttacttcatcctcatccagctttcttatatcagacttcatccattcaagtctaccgtacaactagctttcctttatcaccaaaccagataattcattctatccttccaaaatcatgggcgttagttttggtgctttttaacgtttcacctcttttatattaaaaaaaaaaagtgtattgtggaatgtttagaatattacacatatatatctctaaataaaagaacatacatagcacactaattatgaaacatcaactatcaaataaacattcatgaattcaccatccggtttaagaattagagtatcataatgccattgtatctacctgtatatttcttccttatcccaagctctatacctcttcctcacttcaaatatccttttaatcttttttaaaatattgttcttttggtttttgggtttttttctaagaattttattacaaacattcatagagtatatattgttttattaagttcttagctttatggaaatgtattatatttggaatgactataatttatcatccaatatgagacacttttgtgcatgcaaagggctactattaacaattacagtaggatagcggcataagccagaaggtcttgggcaggtcagataatatggtcaacccacttgtagtgtaggctaaaatttgctttttttaactaaacgttacatttctaagattcatctgtaatttgatataggtatacgctcagtgcattttgattaaagcatttcgatgttatctttctttcaaagatatatgtttgtcctcatagtgtttgtaataacctggacttatctgctgcttttaactttttaatgctatgaatactctgtagtctagagtttttaagacagtttttggtgttgagatggtttgtgagatgtcacctacctaaatgttggaaagttatatgtaaaatattgcgttactcaaagagcttactctttcattctaaattgagtcaaaaggactttttctaaaaacctaaatgaaaactttcttgaggtataaagatataatggttttaaattttaaattcctgacatgagtagttaaccatctgaagactttccacatgtctgtccttccaaatggggatttctaaacttgtatattcattgtttggatttgatgcaatacagaagataaaacccaacagaaaagctcacttcgggcgtgtgatcctgggtatcaggtgttacattatatagtattttacagaggaagtagctcagcaaatttaactggcctcagagtctgtggttcagttggtttgcacagggtaaaagctggtgagtgggttatacaccatcacaaaggatgcccattcttcgcagtgactgcagatgcgtgcggacggagagcacaaggatctcactatcatttctccctgctaactcctagaaagctttccactttcttggacacgttatttaaagtgtatagtttgttttttaaacttgtgtcagaaacacttaccaccatattgcttcactgtactattccaagtcagctcctctgtagccgacctctatatggtgcttggtaaagctattcaatgaaatttagtaccgggaggaaattaggcagcaaaagctccaccttttttttggtggcatattcttcaagtaaattcttaactgtctttgctaaatgcaaagctacatggggttagattatataaatatgacaaatagaacatttcttagtatattcgccatggagtaacctcttaaaaaatctgataaacaattttggcatttattcacctttctcccaagtggaattacaaacatttgaacttgatggactttcataattatctgatactagccatataaccttgaagaagcttctaagcctctctgtgcctcagtttctgcatctgtaaagatgataaccccacctcataggggaaatgcaaagattaaatgtgtcactgcacgtgagacaggtacatgcggagcactcagtgcttgttgattcttacgatgttacgttcaccattatggatattattcaaactgagactgtctgtgacaattactgttcagagttgtacagttgatttaggcagcaagtcttctggttcttaatccagtggtgtttttgtgcaattcagaagacatgtatgttgttcccagtaatgacttggtgtgtttgctgaggtagttcggtaggactgctagagctagccatgaaagcataatatattttcacagagttgagctcagttttcttctagaaaaaaaaaaaaagtccacgttcctcttggagtttgagcctgagaaggttaagaggaagaccggaaaacgagagagaatgactgtaccccagagattaacagaatttctactgttgtctctacacatgaaaattttagctgaacacttagcccctgcttctctcagatcataggcaaacatttatgctagaccgcctgcctgccacacagaaaagttaacaatagatgcagtataaaatcctggattattttccctctttttgcctgtgtggaggccacatcagctaactgtgagcagcacttcctgcccagtggtcactgccagggctgctgtaaacacttcaacaggtgctcattgcacagggtctgagtggtgaatgggagttgacatctacctgccctcttgtgggaaggggcaccattttctcattcatacagaggagccaggttaccctcagtaaccttgtcctagaccttgggggagtagtccatggcttgagtccaggtattacccatttctctttgttcccacagctaagccgagggccactcaaatgtcagtttttgataacagttcatccaacattttatatgcagctattttaatggaatttactcaaagctcatgacaggtttttgttggggaaaaaaaatgattgtcttctatttccatttccctccacctaggcaccctgtcctttcgaagtttttaaatcatttccctaagattcatatccttattctctgagaagtattaaatatattaagttatccagcgtgcattatgttatatatttgtgtgatcttggtcataggtaataaaaccacattttggagatgatcataaagttggtctttgctttttgttttatatttactttcacctaaatgcaaatacaccttcctttagagaataatgaggcccatctccctcctccttttcccatctctaatccttatatttaaatggtgtgtatctatacatcagatcccaagttcatatgcagtccaccttcatttggttctgagtctgccagtgaaccatacatgccatgtagagacgacatgctctcccaggcgtgatactcaaactgtcgagctatctgttaggaatttccctttatttttctatatgtagtcttttgttttctttctgtccccttccttcctcttactcccagcaccaacttgtgtttggcctctcttctctcctgttgcttcctgccatatctcatcacctcctctccatgtctcacagactggctctttcaatcattgtctctccaacaagtcattgtaaaatgtgcagctgttatgtagctgatagctgggatgaagtaaagccaaatgttgcaggggattcttcctgatgttgctttcctaggatttgttgaaaaaaaacaatcatttttctccatctctaccctggtaaatgtaattgacagctaatgagaagtatcacagaggtagataaacgaagcccagtaaagcatcccaaatggctgattctgtttcttgcctgttaaactgttcctccacccactgcagatttgccctcctatcttgctgcatcacaaacattgtgagtgtcatgggaaccactactgtgatacactggtacaacactgccccgccacatccctaactcagctgggcttttcctcctgcattctttggagaagcagaatggagattttttatgttaggtagccacatggattctctccctttgtttgcacattcctgggctccagctttgcagctctctatagttagaaggtaaagaattcaggcctgcttgttgactctaaacaagcatttgagaacagaaacacaaacgctgtactctccctccagtgccatcacaaattttcttgttttttacctattctctctcctcttcatactgatgtatttatatttagagacagaaatgaaatagctccatctttgtaattggcagtgtgtattcatatactatacatttaaattaagtagatgtaatgtcaggtacagttaattctgaaatgtgtgatattagacatgatgctgatattctagtaaatgatcccatcacgttgcacttacactgcttcttgggttatatcctagcgtttttcactttggcgttaggagggctgctgggttttggatgtgtattgaacaggtcttgggtcttacgctgggcctgattgcccctaatgcatggtggaagctgactcagcacggcatctgaatgcaccgctgttgccagaagattctgcggatgttaatttcacttgtcttgcctccagagccagccattccagtttactaacaaagcaaaaatgtaaataagccaaacttaaaaattttttattttattggccagaggcttttgtcagcttttcctccatgtgctgtaagcagcggcagtgtttaaatattgagaggagggagctcaccgtgggggtgaggaatggacaggcaggtgttaactgttcatagcctggctacttttgtttataaaactaagctcatctgttttattaatgaagatctaaggatagtaactgaaaattcctgaatagatttttccgcattcttttttaggcattaggcatttggtatttgtactaagtccagtgtaagtagagttaactcactttgatctggcagcagaaggccactgattataatagattagggtcaaaaacacaaaattaggtcttcacgctagcacataatgagtagctgtttgtttcatggctattgttcttcttgcttggtattaggtaagactaatcaaaggcaacatcatcttagctatcatagacagaaacaaaatagagttgcatcaaatatgaaagtagaaccctttttcttttcacatttcgtgcttcgctgtttgaggcgctcacctgccacctggcctctcggcagactacctgctggctggctgggcatgagggatgggtcagggtgccttcagagctgagactgtgaagccgggaggcacaggtcaggaggaatctcactcacattccaggagccaccttcactgctcccatctttttctactgatacctcccctccccttctccctctccagccagctgcgcttcaccctactccagtgatcacctctgcacgtgtgcctcctgcctggggtagccgcctcccgcctggggtagcctcttccaggagcccctccacagtgcacagcatgtggcacctgctaatgtgaactcatacccagtgaataacttcagtctctgtcctttgaaaaggatcacaggtgtgacgagcctgaagaaatcgcttggtcagagctcgtcctcctacgccacaaagcaccaattcctttatagtggagcctaattctctgcagctttatcatggccattcctagagggcgagagatgcatccagcataccaaccagccataatgaatctgtgcccctcaggaaaatctcagacaaaaagcatgagttctagaaagggtggcacgtattggattaaatatggaaaagaactgtttggcagcactggggtgtatttagagctcttctgtgtgagtgctcacccagtcccacccttcagcaagtgagagctaagtagatttctctaccagccgatatagctgcagatacaaacaagaagatattctggtcaaaaaactaattttcttgcttaatttgacattcaaacaagcagaatctggaaggatgctataatgggaaagagaaagatgaatctcagttaggagttagtcatagtccagagtgaacaggaaggattccagtgagaggaaatgatagctcctggtctaatttgtcaagattagtacctatcagatgaacaatggaggatgcaaaccaatgtctctctttcatttaacccatttctcctggagttttaggtctcttagggctcaagcccatcctaagtaaataaactttctactttttaatttggccttaataaaactcagggtaaaaagcatgagtttatttctatatgtaaatggttcttagccagtgtcgtttcgtgatgacattagcagtagaccctctaaaatggcatttcttgtactgacagaaattttttatttgaaagtctgcataatcatcttacctaataatcttatttttaaatatctatcgaatgttcctttttggcttcactggaggtggaaatcctgcaacagcttgttgcaaggaagatgcatgctgcttattggcaagccgaggaggaaaaaaaaaattaacacaaaatgccattgatatatccatgtttttaatctgtggcagcacagaaaaccaattcagcagttctacaaaccaaagagaacttaagccagtatttttttccctgacaaagtaaaatatttggatgttatacaaaactatttccattcccttccaaatgctgcttagcaatagttaagaaagcaaattgtatattttgtctttttgagagacggggttgcatctctgtatggcttagttattggtagcgtgatgtagaacctcccactttaagataacagctttaaaattcaggccaagatcctggttatggaaactcagcaagtccatgggtcatgaatattctcagcgctgtttctagaggacagattccccattgctgtctggtggccaaggcctttgcgtttgaagaactgcctcagtgttctgagctactcttctccttcagaggtcactccacaccccaagtcaggtattctgatgggtggggaatgagtattcttttcttcaaaagcacaaatcttttcaatctttcattccagcaaacttcaaattaagccttttctcctcttctttctcccacatttagaaataagaaaacaatagaaatttatcaaaatacaaattcccacttggttttgctcctctcttaattaaaaaaagttgggcaactcagtttaaattatcctgtcaatttccgttccctttctctattcttctgtgtatgaaaatacaagaaagcctgtgtcaccaaggcaatattatgtgcctttttcttgctctgcaatctcagcagtgactcatgtgttttcatggtgggtctaatggtccactcccacttctccattatttttttgcattgttctctggagaagcacttcagacacctcgttctgtttgttttcactcttgagctgagtaggctgtccctgctctgaacctctgctcagctgagtgtcactgcgtctggattctgcgtgtgctgcctctgtggaaatgctgttggcattgacccgctgccttctcccttcgctgagaatgaagattcagaatggaggggtacaaaagcttttatgaactaattttagcctagaagtaaaaagtttcaaaaatcacttgagtacattttggaaaatggtgggtaaatgaatagtacttagagtcaagatgctcctaaagttgatttcacaaacttctggtatatcaccatgtttcctaaaagagaataagtaacaattgtggaaggaacaaaaccattttatagagagtgttaggtttatttcccagtcttctgataaccctggagccaggattattatgatgtgttgattgattatagccgttaagactcttactaatcagtttcatcacttattctcaattcacacacttgcatctttgatttctcttccataacagggtgatatgggttgtcattgactaatgaagaacagaattggtttcggcatgagacaaacggaatgccttcactaatcctaaaatgcattaatctttcataatccacatctgcatgtttataaatgatataactaggaattgttaatgttgatattctcccttccaaacagaaagtgacatgggagtttgtacttgcaaactgcattaaatacataaagctgaatgccaagagtgtgaccttgctgaggatgccaaatatattacttcatttgatggttttagaaaagtagcatgttgcactttgagtgttggatataccaggagatatcctgtggaaagccaactatcctaattgttccgtttccttcctgccttattttatcattctattctgtcattaattcagcaaagcactgagtgtgtattatgctgcaggcgtagtaagtggggtaaaggcgctgaacataaactgcaaagggtcctgtcctcgtgaaacttaaagtctagtgggaaagacaggaaatacataaataactacatactttattgtcaggtagtcaaggaaaaaaatcaggttacttctttagatagcagtggctagttagggcaggtgtctctcttagaagctgatatttgaacaagagaagtgaaagaagggcaggggcaagccatgtgagcatctgggaaaggagatccaggcagagaacggagcaaactcaaaggccctgagttagtattgtgcttagtgtgctgggcggcgaacaccaggaaatcagtgtagccacagcatagtggtcacgggcaatggagcagaatgtgtgggcagttaggtgagagaggagctaacgactttgtaggttatgattatgatttaggaggtttttttattacttctttttgagaaggagtctcactctgtcttccaggctagagtacagtggcacgatctccactcactacaacctctacctcccaggttcaagcaattctcctacctcagcctcccgagtagctgggactataggcacatgtcaccacgcttggctaatttttatatttttagtagagatggggtttcgccatgttggccaggctggtctcgaactcctgacctctcgaaatctgcccatgttggcctcccaaagtgctaggattacaggcgtgagccaccgcgcctggccgatttaggagtttaagtgtgatgtgatccctctggaaggttgggaaggcaggaaatagcataatcctgtttaggttttaggaggctcactgtggctgctaagtggacagtatactgtaggggaaggtgggagcagagacatcggaggctcctgcagtaaccacgcggagtgttgatggccgcttggatgtgcacatagcgggagtagtggcagaaggagtttggccgaaggaattggtaaatgatggttctgtacagaagacagaggaacacgtttttgaaggggaatcgagagtttggttttaaacatactgtatttgaggttcctactgggcatcctaagggaggttttgaataggaggttggataagatctggactcaggcagtattttggtgggaaaaatgagtgtgtgaggctttagggttcaggatgaggtcccctgggcacccagcctgcctcagcatcacttggagggcttgtgattcagtagttgtggggtggagcccgagagtttgcatttccaataatttctagttctgctgaagctgctggtctgggaagtactggcctagggagtgagtgaaggtcagtgctcctcagcactcgccacacaacatgcctgggaaaggaccggtgctggcccagccctggagatgctgagctaatcggtctgacacggggtattccgtcagtactttcttaaagctctccaggtggttattatgcacagccaaggctgagaatcactgagagaagaattctgaggaaaccctggggtacccaaaaaggtagagactgtgaaaaagaaatgcaagaagaaatgtttctagaatatggaagagagcacccgtgtccaagacaacttagcacttccccagtgctccatgggcgtgcctgagaaggaggcctgtcttcccagttaggagcacatacatttctcacaggaaagttgagggatgattagctcatgtgttaagggcggcatagtgctgaggttttttcccctgatctttctagaactagatttggttcagttgaaagtaatgtcacagaaaaaattcttgtgcaaaaatactgttgtattctcaagtccagttcagttagcagcagacttcctcatttccacaattgttacctgaagttcatttcacatgaaatccaagaatcatgttattttaattctacttgaaaaaaggcaaaaaaaaagtatcacattttaagagaagcgagcctcagtggatatatttttgctgcttgttcgtttttcatgtggcctcagtgccttttcttagaagccgacggaggaactagttgagaattccctgtctctataccactgaccatgactttgcgtcagatctttgtccctagagctgcattaaagaataatgtgatttatcctttctgcctggaacatccatcccactcttcatgcagcccagcaaactcctccttacccttcaagaccccgctaaaggatctttcccttcacgaagtccttgctgacccctgcagccccggagttcagctctccctcagggctgccccagctgcctgagcccctggcgggctgagagcctctttcttctttttgtccccagtgccaagaacagtgcctggcaagtagcgctattcagtaaacatgggccaaattaaagaactcacagttctcttagaaaaatgggaattcaaaaggagagagttctgaaattggtgacttataacctttctcctgtgggcttggagccatctttctgcctttgcatttcaccctccatgggatcattcttttcccctccctcctgaaagcgactccactgtgacagatacctttcacaagtgtgcttgccgaatatttagtccaatctgaaagaagtaatggagagtacttgaggtcgtgctcgagaaccttcctctccacattgccacagtcagaggctctgtggcctgcacagccctccttgtcccctggcactcagcatggagagcttagccgtgcccaggctggcactgcctctggcagagtttactcctgagctgcggggtccctgagggtgcccactgccacccgcctggacctcccagttctagcctcgtgctggagaggtctgctctccccccagcaacctcacaagcccagcactgttaaaaaggagtctggttattgattaatccgggtttcattgtgcaactctatatctcttgaaaaagcacttatttaaacacccaaatgtattaatatgtcatggtgtgaattgtgatagtgaagcaaggtaagcaggtgctggtttccttcaaatatacattgtgaagtgttgatttatcccccttagatcctggagatttcactcaggagcctggggttttttgtttgtttgttttttaagtttttcagaatagtaagtggttttagctgtctcgttctttacttttaaaagtatgagttttatgccaagggtttaaaaatcttaagttttatcatgaaaacaagctgtcattagttagtataatcacaaatgcaatgaaattttaaactctgtaagaaaaagcatattattttagtacataaattgacacttaattctatatctaaatggagaatttatagaaaccatgccacctatagtaccagtgttttatctgttggtctcaactttatacattctgtgttatttccctcaaattccaatatttaattcccaaaccctgtatttttccctccctcttctgacatccagacgcagcataaagatgcccattgattgaccacgtgtgccaccttttggtctggaaaacacggtccctcgtacctacagggcacagcaagcgctcacgtgctatattctcttttaggtgcaaaatgactccaagggagtgagcatccgcatgtggcacttctcatagccaaccacccatgtttacaggcagagttgtcacgaagcgttggaacccagaatgagaaatttgtgacaagagagggtggaggcgagtgaaactttgattaaaggaaagtgccttggctttaaaaaggcctgtctctatccggcagcacagagcagcgatcaagtggaagaaagggagcaggcaggcgcctcagctaatctttctcctgggggcccaggtggacaaattggcaaccctgttcacagctttttttcttctcccctttgtgtcataagaactgctaatcggatccatgctgctgcaactgtggttagttattagcagaataaaagcagatttcttcaaaagaacgggtgggggaaacgactatacaaaattgcaaggttgttagaatctaaaatgcacagcagtcgatttttccccttattctgaattagacgatgaatacaagtctttcatctgtcactatacccatttcttcagaggcagccaaatattaagcttctcaaacaaaaaaggaatcttagaaagaggaaaaatattgaggaggaataagaatgggtgagagaagggaaaaattaggttttgtttttattaatttgccctggtgagagaaatataaaccatccctctatttggtgttctccccgccgcctcttaccttacatcaaagcgaggattcgagagaatggagctggtggctgttcagcattttatgtctggtgttctgcctgaggaaagttcagaacctacctcttttcttacagatagcagagtgctatgaatccggacttcctgggggaaggccgggctagcgatgccatacccaaatgtggagaatagacctttccctccacaagtgggttttcacgtggcccagtagaccttggaattgtatgcctgagctttaaagctattgcaaagggtgtgttttgatgagaatgccagattttcagcatggtagttgatgtacttcaggacatcatggactttcacaggggatgcctcgcagatcctcaagattcccaaagttagaagtggttcctgctttcaaccaaatcacatttttggtcatactgcctatttactattcatgtcttcacatctgaagttaactaaagttgagaagctttccttaaagttccatcttttatttaatggctgttttatccacaaagacacagtttttattcacctccccagagtcggtcctgagtggagtggcaagtgcagtgggacccaggctgagctgtgccagccgccaccctgagagttgtgcctcagtcaaacccaaagcacattatattcccacacctttcaggccacttagcagtcatccagactaaaaatgtctcattttaatgcggagaatcctctgtatgtaaatgttttatgactccagtttattttttttattttttttgagacggagtctcgctctgtcacccaggctggggcgcagtggcatgatctcaggtcgctgcagcttccgcctctcaggtttaagcaattctcctgactcagcctcccaagtagcagggattacaggtgcccaccaccacacatttttgtagagacagggttttatcatgttggccaggctagtctcgaactcctgacctcaagcaatctgcctgccttggcttcctgaagtgctgggattacaagcgtgagccattgcgctgggccaactccagtttatctttaatcaaagctgtgctgacttaaatagttaagtctagaagtccgtgcatcaccatgtatcctctgacttaacttgtcctttgccttgccagagacttttcagtttctttgccccaagttctctgtgggaaggtatctccccaaaagggatctcatgggtattagtgatcagactattaaaccaacttgcaagggtctgtcttaccctcgcacctgtcacagagttatgaggaggacccatgcgaaaaacattgtgtagttttagtatgtttaattaataaaagaaaagttctggtttgaatctatgatagcaggctgggtgagtaacgttttataagttggtctttaagggcttttatgaggacataattcacatagaccacatcatactcacttctgttttctacctgttggctgatcgtcctttatagctaatctatcttcaagcctaggagtgaggtttagaaaaagacttggaacactcagaccacagtagggaggagagttgaaaagcttaatccggcaggtttttgacagtgtattagtttgtttagaataaaggtatatggccctgtgaacggtgcgtgggagctgtcttgttctctcaagttcgggaattggaagtatccttattcccttcatggctcgggagtatccaagtcagatagcctctgaagtgcccatttatctgtatttttaggacctaatgacacatgaatagtctgtaatattttggataaggatttaggaaagtctagccccgttttgaatgaactttcgagctgtatgacatgaaaaggtttatctctcaaagcaggggcttaactccttcaaggtgaggacaccaaattgctgtggttctgtgttctcagttgaaaggtagggaagaacattactttctggtttatactgctctaatctgagataggatttattcacaataaagaattgtgttgacagcctgttcaccaacatcttccccacccctctgccctgatacaggaccttttggtaaagggtgaggtgatcttattagagacagaggcacacacaccccatgctgaacaataggaagtgttataagttcacacccacgcacttcagataaactgttaaccggaaccactaagcggaagcctgagcagattctgtatttcagtagtttgcttggagcatatcgaagttggtgtcagccagcctgcttcttcattctgagaataagtgggatttttttccgttcttgaagcaagtgaaatagaaaacactgaacagaaggatgctatgtctaaataacttgtgggttttctaactcatctaaataaatgcctgagactaggacatttgttgaatgtatggattatcaaaaatgtatttttcatttacaccattaggtattatgcaggtttttaaagaaatgacccatgaaatccttgtgctgtgttgcagagctgtaccatcttaccatactctagcttcttactaactgagataagatgtacagtgatttccacagatgcggagtctaccatgcaaccaaccaatgctgtctcttaacaaaattatattgtcatttatcatggtggaaggaaagatcctgaccagttcttcatgttgcagaaattaaaggagcaactaaatacaacccatagtaagaagttatagtgtaattactagtgggtttggcagaatataagaaatgcatcctccagaagatcggtaaagtcagatggtggcaggtgagacccgtattctactttaaagatttgaaagagagccgatttccatgaggctgtactagaataaagcaacccagtgttttaattttggatgcagcagcagaattgcacagtcagtgggaagcacaagatgaacacgatcatagtagtaatgtatcagtatttggttgctacaatgtgttcttttaatttctcactaaagttaatgacaccaccaagaattcttgatgagtagaagaattaattcaattgctaattgctgaaaaccatgaactatgtattgattttgtagcaccatcccatgggagtaacttgatcatgatagagttatttgcaaagtgactggaagcattcctcatttcttctcagaattcaacaagaaccacaaccagtttaattcacacggacctaagaataggtctgtcttacccttgccactgtcacagagtttatgaagagggcccaagtacttgccactaaacacctcatgatctccatgtattgaggatgattggccaagaaaattatccaaatttccatggtttcacatgtcttttcacattaattataaaaagccaatcttcttgaattactaatcgaagaatataatttaggacattgccctctatatagtgagtactcttttttttttttaacctcatttggtacattcaagctatctctaatttacctgcgaacttgtaagacaaataaatgtatattctagacagtgctctctctttagctccttctttcttcacttttgcccagagtcagctaacgtaggaaaattggaaggatagaatggatctgaggcattaaaaccgaaatcaagtagtgtctgtcattcagactccagatttgctatcttgactaatcatgtcaatattccatctcagataactaaatccatcttaggttagttggctttttagctgtaatgatgtgaaaggaaggaataatttttctatggccactacaacttttgaaacatggaatttctgaatatttctatatctattagtattactaatactggagataatgcagtattatttgaaaaggggtgaatggtttgtttgccagaattggttgtggttcagagttagtgttcttgttctttttctatagttgtatactgtagtaatgtagaaaggaattatccccaaggaattttaacctcaataaaggattaatgtgggaatcctattcacctcatgtttattctctaccatcccaacacaaaagtagtagagtataatttacgcaattgcatctgatcagtagttgatctgatttgttggtttgtttctgatccgaaagagttggaaaaataaaactacaagtaatcatttatctaaacatttacctgctaaatgtacttaccatttaagtcttagacttttgcctgcattaagtgctaaggaacccagcgcattcttacatatagataggagagagcataaagcaacttctgttactgacatttatttatgaagccttcccctttaaatatggaagaatgtgagatttctatgtcagtgctgttgttattaaatactcatctgtattggctttttcagcaagtattcctcctgagtggttcttttttttttttttttttttttttttgagacggagtcttgctctgtcacccaggctggagtacagtggcgcaatctctgcctcccgggttcaagtgattctcctgcctcagcctcctgagtggctgagattacaggtgtacgccaccacgcctggctaatttttatgtacttttagtagagacggggtttcaccatattgaccaggctggcctcaaactcctgacctcgtgatccacccacctcagcctcccaaagtgctgggattacaggtgtgagccactgcacccggccttcctgaatgtttctttactcactcatattatcatttagaacagggatcacaaactacagcctaaggaccaaattcagacaaccacctgttttggcaaataaagttttatttatgctattttgttttcatattgtctgtggctacttttgaactacaacagctgaggtgagtagttggaacagaaaacatatggcctgtgaaacctaaaatgtttactatctggcagtttacagagaaagtttgtctaatcctcatctagaataataagataaaactacatgattacagatgagttacaaagatctaattatctattaatctgagcttggttcctggaatcattagccatacttttttttttcaacaaatacttattgaatggttactatatgcctggttcaagagatataatatagcggggaaccaaacagtctgaattttctgtctgtatggaatgtacattgtagtcagttgagacaatgaacggaattaaattaagaactatggaaagtgttaatactgtgtccagttgtaaaaaatcgtagaacgtggcacttgttagtactgactgccccaccatcttgttctatgaagtatgctgagctataatatattcatgtctcagtccatccactgtacattatacattactggatgtgtgctaatttaccaaaatacacatattagcctctttttcccaattgtgttatatactaaaatcccagagttatgttacttgaatatttaatttggtacttatcttgatttagttcttaaaagctatttttaattggataaaattctcccaaaacttctcctagtgtaagattctaaagaaaatattagcaaacagaatccaacagtacattaagaaaataatgtatcataagtggcatttattccagaaatgcaaagttggttcaatattaacaacttttttttttttttttttttttgagacagaggcttgctctgttgcccaggctggagggcagtaatgtgatctcggctcactgcaacgtccacttcccaggttcaagtgattctcccgcctcagcctcctgagtagctgggattacaggcacctgccaccatgcccggctaattttttgtatttttagtagagacagggtttcaccatgttggccaggctggtctcgaactcctgacctcgtgatccacccgccttggcctcccaaagtgctgggattataggcgtaagccaccacgcccggcctaacaactctgttattaatatataccataaacatacatctggtggggggaaatcctctctgtaacaaaactcaacacccagttatgataaaaacactcaaggaagtagcaatggagagatacaatctcaacatggtaaaatgtatatgctttagtttcacttatggactagggaagctctagaggcatttccactaagatcacaaatgaggcaaggatcatcactatcttcactactgttcagtaatgtactacagatattagccaatgtagttaggcaagagaactcaattaaaggcataaggatgagtgtaggagaaataaaactgtctatttacggatgatataatagtaagcctggaaaaccccggagaatcaatgacaaattagcagtggaagaattcatttaatgcggtagtgagacataaaattaacatacaaaaagcagtagtctttctatacacaaacaataaacagttaaaagacatataatggtgaagagaatcccatttacagtagcaacaaggaagactacgtgcttaggaataaacttaacataaaatatacaaaccctctaggtacctgaaagaaactaaagaagacttaagcaaatgaaagatgtctcttgttcttgggtgggatgaactcagcagtcatgagttctccttgactgattatttcagtccaattgctgtgaaaatattagtgagctattttatatggttggacaggttgatactaaagttcatatagaaaaacatgcaagaaaacttagaaaacactgaaaaagaaaaggtgaggagcactattcttactggacactaaaacatggtataaaaatactggaactgaaaatagtgtgtgctagccagtggaacagaagaggaagtccagagttagaccaaatacatgtgaacatgtattaaatgacaaagatgatatttcaagtcactgggctaagaatggatttttaaataaattgtgttggaatacttggggagccacgtgcaaagagattaagttagatccatcctcacatcaaataaactcaagggagatggaaaaaaaacatgtatgtactcgaagaaaactagggtgaattcctctttaaccttggtgtagagagaatagcttcctaactgtgactcagaatccagaggcaataaaaataaagactgataaatttgacaacattaaaaaaaatttccgctacaaaagacaccgtaagcaaaactaaaagacaactgacaaactaggagaagatattcacaatatataccacagacaaagggctaatatctctaatatatgaagaacccttaaaaattccagggcaaaggattaagaacgtaagcagaaaaataggagaaagacttgaacaaacaattcacaaggaaagatattaaaatggccctaaaatctgaaaaagtagtcaaactcattcagaatcagtaagactggtaattttttatttttaattttttttgagatggagtcttgctctgtcgcccaggctggagtgcagtggtgcaatctcggctcactgcaacctccgcctcccgggttcaagcgattctcctgcctcagcctccccagtagctgtggttacaggcacgcatcaccatacctggctaatttttgtatttttaatagagacggggtttcaccatgttggtcaggctggtcttgaactcctgacttcatgatccgcccgcctcagcctcccaaagtgctgggattacaggggtgaaccatcgtacctggccaagactggtaaaatttttttaaacagcaatacattctattagtgaggttatggagagacaggcctttcaaacattgcttgtagcaatgtaaattggtacaaagtttctagaaggaaatttggaattgtgtaacctttagacccaacaatcccacttcagggaattttccctgaacatagaccccagcaatacaaaaatacatccacaaaagactggaaactgtctaaatgcccatacacaggagagtgttgagtaaactatggagcactcacataaaggggtgctggggagcccaggacagtgtgtccaggacagcgtgaaaaaaaggaaagcccaaagggtgtgccacaaacttaccagcttaaaacaaggcacattcattatctctgttcccctggcagagagttcaggcacctcttagctgctcaggacttacaaggctgcagtcaagatgttgggcagcctgcatcctcatctggaggctcgactagggaacaatctacttccagtttcattcggattgtggcagcttcatctcctagcagttgctggagtgaggtcctgagattctggaggcctctcgttcttgccttagtctcagttcacatcagagaagcctatttcctagaaggcctgaaccctgttgaaatgtcaggcccatacaggatcatctctctccattttgattatttcagagtcagctgattagggagtttaattatatctgcaaaatcctttcacatttgccatctgacatagttgcaggagtgacagcccatcactttcttcacattctttggatagaattacaggttctgctcagtggagaggaggggattactcaccggtgttactcattggaggttactcgagggtgtgtctgccacagtgagtgaagagaaatagtctaataaataaaaaaccaagtgaggaagaagatggctcttctcacaatggaattccagtaactaaatgtggaagaaaaaggggaaatatagaatcaccgttagccgataccactgtaataaatgtaaacaagatcttctaaaggatccagaaattcgtgagtgcaggtttgaggaggcataggatttgcatagtctcaaatatcttccaaaaaatacttaaccaactacaatgggaaaatagattgtactgagaagggtatgacatttttgtggtacacttccccaaattcataacctcattttagggataaaaaatataatcagagcaaataaaatttggcaacattctacaaaataactgaacagtactgttcaaaggtgtcaaggtcacaaaatagaaggaaagactaaagtacctaccagctggaggaggctaagggaaagtcactaaatgaaatgtgggatgatcccagaaaaaagacatgacgcggaaaaatgggtgtaattcaaatgaggtctttaggtaagcttctcttctcggtaattgtattatggttatacaagatgttaacattggaggaggtgggctaaaggatataagggaactccttgcactatttttacaagttttctgtaagtctaaaattaattaaaaataaaaatacgtttttaagaaaatgatagcatagacttaggctgataattttatttcagtaaaagtagaaatgcaggtgacagttctgcacctaaattgtgcacgtggctgtgtgtgttatcattggagaatacagaagtgtgcaatgatggaacttactctaattcatagtatagtgttttccagttgtatttttttccattatgcttacatcataatagacattgctgaggaaagaacacgggggctctctttatttatttttttaagctattttaatgttaaagtgccttcataaagtgggttggttcactgtgcccagcagtatgcgctttaaaaattattaccacactttgtttaagaggttttacttgtgaccaacacatgtcatataaaaatctgtaattttgaaggtgtttattgaattcggttggttcggagggctctgaattttcttctttacatgggccaaggacacaaatgagtcttctgttatcactttctcaaatgcattttctgagtcatcatctgctgtgacgatgtttaaactatgcctgtggaagatcaagttgtttcttagttactgtagttactgaatcatagtaactatgacttagtagttatgaaactatggtagaaagatagggagtaaaggaaaatgaataagatggtttgggtggatctgtatcatgataaagctcttgtatctttaacagaatgaatttggtatgtgaatattctcattgctttaaagagacatctgtcttagaattgtgccacacaaccagaagtgctgcttggctgtggcggtattttatgaatcatgggatgcattacttacagccttttttatttctacttgaaatattgtgcataagagcagtgcctcgggcgtgcactgtctaagccacggtgccctgtgttcacatagaattactgtttgtttttactgtcatgagtctatgaatccagcctgtcatgcagaagtgatcctgataatgtaagcacttactgtcttgctgcagctgattccccagtgacattttaaaaagtcagtatttggctgcagagtgctttaaatttctaaatggactatagattggaggccttagggtatttcataggaagcacatgaccctgcagtgagcacacagcaacttttgtagatctgtagccaagtcggtgaccagtatttacccttgaaattgttttggttcagaatgttaggtgttttttactttacatttaattatttggtactagtactaatttactacaaatgtctgaaaccaaatggatacttaacgaagtctatgctgtttgtccaggtcttttatcccgactagttatggttctaatgtaaaaagcagcttctagtggtgacacagtgcatatttctcagtgtctataaattcaggtctttggttttcacttaatctgaaaatgagagtggcagttacacactcaggaacactcagaaatacataaacaagttttgcattcttctctaaacaaagcctaaacccctgaaaacaattgttttatagtaatattttaacagctatttatacgtgttatctaaactgaaaatcatattcctgatcctctgactgccacagataccccgtgattagacttagtaaggagtgaccgtcctgagagattctgggaccgtgtcctgcctggccacatgggtaacagacccatcttgtagaaccacaagagggttggttgttgtacatcgtcaaataccaggctttgtgctgaatgtgccctgaccttcacggggggcgaattggtgatgatctttaggacactaatttttttctttattatttgtaattcttttgagcaatatgcctgactatgaagcagtgggtctgacggagtcagagcggttagcctgatccagccggggtcccaggaccaccgccccagaggactatgcaatgttctttatgtgtgtgtgtgagtgtatttgtgtttccaatttattgaagcaaagagggagggtagaagataaaatagcatggtcctcatgtcacgagagctagttagtgccttgaggactgtgctaaattcagctgctttttaaattccgttacatttttagtcttagaaatgcatttaaacctctcagccaaaaagtgagttgagatcatcagctacctctgatgatttttaaatttcaaaatctcatctcctgccttcacatgactcattatctctcttttatcagtatagtaagaagtatcttcctttaaataatattctcagattatgacttattaagtatttgctatgttcagagagggattgaaggaatacagataagattcctgtcttaaggagtttacattatatttggaaaagacaaactgagcatacacttaaaactggaaattaaatagatgctattgctgtattagcaataaagatcaaaagagatgcagaataatagtcccttctttagtgatcatgtatactgcattttatagtagtatgttttttgtttcttaatggaggtcttctaagtttatgttaaatctctgactgactaatgatgaagatgttttagaagtctattgatattactgtactgattggatattaccatgagtaattgttggccactctgcatgcctgcccacctggagactcacgtaagagtcaggaggatgagtttggcccagctctcctacgttttcttaaatgcattgcagaagtgtgtgtcaagaaatttcagctacagattgattcatatatgagtttaggaactcattcagtaacaacttttcagcaagtgtttagctaaatatgtttattcatgtttcctctttgtttcccagggaaaagatgaactattacactctgagctatgtctttttttaatggggctataccttttgtgatcataaaaattaaatgtggctgtgtcttggttttgcatgactgcattattaatgcaaagggttcccccatctccactttccctcctgtgttttacaggtagtcagatgcctccgcagccacccgggagccagtcagaatccagttcccatcccgccttgagccagtcaccaatgccacaggaaagaggttcgtctccagttcatgtcttacatgcctatagtgctttcaggcgataaggcgtacgtgagtttgcttacctatgcacctccttatcattaatttttttaaaggatattatgttttcttatcagacggaagaaataaaagcccttccaacaaatatggagaggagggaggatgctttcttgtaggttgggtgaagtgtggtcaaagtacagttcaaggcccaaagaatgtgtgtgtccacatagcaccatgaagcatggttcacatatgactgtagtctggtatttggtctagctgtgtaaaaataactgtgaatgactcaactagggtatcagtcccaatgtgtgtgtgtggcggttggcggtggggggttgtgtgtgttaatactggttattccctgatatttaatagtaagattttaaacccagagcaagaccctgtcttaataaatggtaagatcttagaactggagcagacctaaaagtttctatggcccagtcacctaaagcaactggggagtgtagcggttaggtgtgacttcccttattctcaggagctagttagtgccagtcccagaaaaaaagaatatgggcttttccagaaacctttggagagaagtggccccacatctgccagtgctcttgacctttagctcagtcctgcctgtcatccctgccgtgcatttcttaactgccttgcagagaccttaagcccacccatatttacctctgtcttcattatcccttggagtaggaaagctactcttggtggtggtggtggttttaatccagattggtgtattctggaggtacaagaagcctacctgtgcacccctggtgcggtggcaggtcacttcccttgctgtggggcaaggcttgtctgctccatcccacaacaaacgagagagataccgctgtcctgcactcccctcctctctcacacaggcccagaggccagaagttcccaccttggcagctaatatgtactgggctcctgacccctactgtttataattatttgtatatgagttgtagagatgatgatttgcttctgattagaattatgaggtttaagttattttacatgttacaaactcagcaacatgtttagaaactaatgtcaatgaaaagatagatttgctttctctacatatcatttgtgttgaatgtttcagagggataaaatgaatttttcattttctaataccattacatatatatattataatttaaggtatagtcgataatataatgttttaataatggaatagttcatggtttttaaacttcacagtgtgtgagaatcacctggaggacttgttaaaagagattcctgggccccacccccaagtttccaattcagaaggtttgaattgggacgttttaaacctccatttttggcaagttctcagatactgctgatgccagtggtttgaggaccataccttgagaaccactgccttctaatagtacaataataggtttttgaggtgggagaatcacctgagcccatggaggtcgaggttgcaatgagctgtgatcacaccactgcactccaccctgagcaacagagagtgagaccctgtctcaaaaaaataaaaatagattttaataattgtgtgaatatgtggatttgtttccctaaattctctactgtgacctgctccaaatcatccttttatcccatatcatctctctaaattgcttgatctgtgttaactcctcatatggctctggtcatcttgaaggcattatagaagtttatagtgtactggtgccaagcaagcgtgattcttactaaaatccttttttggttgtgagttgcacctgtgttgtattgttgggtcactgtggggaaaaaggaaattgtcttgcactgggtgcctactcgggtcaggcagagaactgagatgaagattcaccccataaccctgtaacatcactctcactggtacagttctttttattttaacaagtgttaaagggtaaaagttcccttatttgaaagtcttaaaattttaacctttattactaagaagaaaacaaagagaaaccctctcagatccttgaacaatgtctttcccagccctttccaacagatacgtgtttgggaaattgggcaatgtagaaaaccagatgtgaagaacaggacaacaattaggaaacttagctaaatcaaacttttaacttaaattgatccactttcaaggcaaaatctaggctctttagtggtaccactgtatggaaattaccatgttaatatgattattgtttttccttcgattgcctttattatatgtagtgtagtttgggtaactgataccaggtacataacaagctgggtggttataatgaccacttctttttttttttttttggagatggagtttcactcttgttgcccaggctggagtgcaatggcacgatctcagctcactgcaacctctgcctcctgggttcaagcgattcttctgcctcagcctcccaagtagctgagattacaggcatgtgccaccatgcccggctaattttgtgtttttggtagagatgagatttctccatgttggtcaggctggtctccaactcccgacctcaggtgatgtacctgcctaggcctctcaaagtgctgggattacaggcatgagccaccgcacccggccatgaccatttctttcaaatagtaaatataaattatataagttgctaaatgtgaattgatttttatgaatgtgatctctaaacctcctctgaaagactgtgagagacattattatattgttatagtttgttttcacactgctataaagaactactggagactggatcatttatgaagaaaagagatttaactgactcatagtcctgcaggctgtgcagcaggcatggctggggaggcctctggaaacttccagtcatgatggaaggtgaaggcaaatttagcacatcttacatggcaggagcaagaggaagagagcgaaaggggaggtgctacaaacttttaaacaaccatatctcgtgagttctcatgaggtagcactagggggacggtgctaaaccgctagaaaccacccccatgatccaataacctcccaccaggccccacctccaacatttgggtggggacacagttcaacatgagatttgggtggggacacaaagccaagctatatcactgtacattcccttttgtgtgtgtgtgttggttaggcaacaccctgaaaaggaaaactttctattttaaaatgactgttacgttagaagatgctttgccttgcatgagtgaaatttcctccagcactgggtagcaaggctttaaagaaaatggctttattatttattaaaacttaggaagaaatgttagctcctaataacctttgatcaaatgccacctgatcaggtgtctaaatgacagtgactttagtgctttggcacaataatagaaacatctgtttgttggaccatcatttggtatgtaccagcagcatacacaatggaaagcagatctaagaaaactcttactaggaaattccccaaaattcattcccccatattggaaagtaacttaactttgtttatactcttacggttgatatatacctaccttgtttagggaagtgctgaaagaaacaggccaagaaatacattagtgagttagtatctttttttaaaacgagtatatcagactgggcacggtggctcacacctgtaatcccagtatttgggaggttgaggcgggtggatcacttgaggtcaggagttcgagtccagccttaccaacatggtgaaaccccgtctccactaaaaacacaaaacattaaccaggcatggtggtgtgtgcctgtagtcccagctactcaggaggctgaggcaggagaatcgcttgaaccagggaggcggacgttgccgtgagctgagatcacgccactgcactccagcctgggcgacagagcgacactccgtctcaaaaaaaaaaaaaaaaaaaaaaaaaaaaggtatatcatggaaaccatagaccctgatagaaaaggtaatgacattgcttctgtactgctgagtgctgaaataaccacattgaacagttctgtttacacttagtttgttttaataaataagattctgataatatagtaatagtccaccatatacgtactttctttaatgtacccacaggagataacattttctttaatggcacggaatctagaaacacatttgcacagagacaagagatgatggagagtgagagatgatgcaacctacttctctctagaggtgcagttttctgagttctccctccaagtcctcatggggcagtgatgctggcaacactgccttggagcctaagtccccccagtttcaagtagctgaacccttgctctgatctttcttttctacttggtcctgtgttcccgttcaggaagagcatatgttaataaaccatgtaccctgtgtgtcagaggttctgcaaacctctggtgacagcaaggtcagtgaagtgcccagctttcctgacagcagtcctttgtaaacctgcagtccccgtccccaccccatctctttttcggtgcccattttatctggtggttttggtattgagttttgtcacaggacatcagtcacaaatccatttccccacattgtacacagatgaaaataactgtgagtttctacagttgatattttctatgtatagaaggtatttgtgcaagtaaatatggatatggcatcataggttacaaatggagggaaaactttagatatttattgggctctctactctcttacatagtattgcctcctctacatcttctgttttccagtataaaacttgatttagtattgtgctgctggaagttttctttgtttgtttgttttgtttgttttgagacagagtcttgctctgtgacccaggctggagtgcagtggcgcaatctcagctcactgtgagctccgccttccgggttcacgccattctcctgcctcagcctcccgagtagctgggactacaggtgcccgccaccacgcccggctaatttttttgtatttttattagagatggggtttcaccatgttagccaggatggtctcgatctcctgacctcgtgatccgcctgcctctgcctcccaaagtgctgggattgcaggtgtgagccaccgcacccagcggaacttctttttaactaaataaagaaaattagttcagattttttggcctttacttcttcattatgtacatgaattttaaagaaaaacagtaaaaacctcagtttagtattctgttgtaacacatttgccattggtttttattttaaacctctctgtagacctcatatggcaatatacagaaatgttactaaatcaccttgccaaaaaatcaagcagtgtaaattaggccaccaaaggcattggaggaacagttcagataaccttaaaatactgaaatgaatcttacaaaaattgtaggtgaccagttcacatttgttttatccttatttcttaatctttatatgtcttgaaattcaaaaagaaaaataggaaacggcttattaataggttgtcctcttaggaagtcttggaggaaatacggaatagtcatctgagtagataaataagtataataattattaacattaaagttaccacatttttaaccccagtgacacgttaagcttaatgaaactaacaaatgcccttctagtttattggattagcaattaggtgaaaatgctgaaagaaagcttatttatttggacagatgtagagaggtcaaaattaatttttcgaaaaccttctaattgaattcccttttaatttcacagtggtgtctagttaaacattcatgttaatgccggtgattttctgaaggtctgaactagatctggattcccaaaatcaacacaggttatttaaccctttttatctagtaagccagcagggactttcctagtgtaatcccatagtatttgaataattagaaggtcataatgaggatttaattagtccttgagatatgctgaagcagaacccctaggaacttcccctttcggacacagatgcaagcagaatggatgctgctccaggactgtgagccacgaggaaatgtattctgttgctggaggcagttctctggcaccattgtgtggccatcagatcggtgctgaaagcatcttaggtgaaatcttccagaattactgaataacagtccccccaaccttcatttctgcccactttccaacctacacaaggactggcttttcctctccactgttgaaaaagaggagttgtagtcaaagcacgctgtacctgattgaaaattggcttttgctttatcagcgacaccaacattaggtgagctgggcgagttgtgtattttctctatagttctatagagaaaatagataacaaaattttgtgttgttctaagcctctggtattttgtccagccaaacatagagatcttgacagctgtttgtcagcagaatcacaaaaatctcatctttggaatctgatgttcacagaggaatatttatcagtagctacatttttgcaaatacagacagtgccattacccagcaaagtgtgtagcagatggggcatgatcaggcatttcaaggttctttttgcgtactactacaaaaaggtgaatcaaaatttctatacttcaaaagtctgaggtttcaaaattacatattttgtttagactgaatagtcttcattattgaatatttcattattcaatatgtcttcattttttatatgctgcttctgttattaaccccgaatgttaactgccttggtataattttattcctactaattaatggtatattttagcttctttacaaagtctgagtagaattccttatcagatttcgagtcacattctatttgcatagtgcacaccttttggctgcgggcacatctttctcttaccttttcctgcaatcaggggaaaaagaatgaattcagtgtcttcctatgagttcaactgagcttccccagggcctgcatggccctcggtgttcatcccctgccagggacccccatgtcggcagcaggctggggcttcacagatgctcagcagagactgagccaaacaactaaagccatccagctctcacaccctgtcaaagcacaagacaaccgaactagaaaatctttattgtttggaattaagaaagcttacaattttaccaataaatactgtatgtcatttgctgtaacacagtgtttgtccctctgaactcactgttagtattttgagcttacacaagattaaagctactgctgctgctcccccctgcctctgttcttcccagatgcatttccatgactgcacagctgtacttacagtgggtgtcagtatgagccatagcccttgcacctggagcctggcactaaatggattgtgctgagtcccctccccaaccccagccgtgctctttatgacccaggggcatttagatagaaatatgtaaaattttgaaagttttttactgttgtcagctagttttatggtgatatttataccaaaagttattttttaaatgtgaaaattactcttgaatatctgaattgacctaattccttaatattcaagaatagattaacaagtcagtactgaaatgaaggagaccacccggataattgttaaggagttggaagtggggtttgatacttttttctgttttgcaacctacggaaaccgtgttgttcttctttctattggattcccggttgtaagtgtgacagtagatctgcagatgctgagatgtatcataagatatactggttgtcagaaaatattctcttaatctacctttctagttttaaagagtaagtgtatcattttcctaatgtatgctgtgtaagtttatagatcaccccggtagggcatcagcaataatctaccctcacccccagatgcaattaacttagcctccactcttaattgaagatcccttctttgtgatgtgtgaaagatgaaaataaactcaaatgggaggctttatacaaaagagaatatctagacaccactctggaaagctgcttctaatttcttcagcctcagaactctgcctctgtgctagactgtggaccaagccaaagctagtcagtaatgaaggcagtcatggcacaggacttgtgtcaggtttatcattaagttccttttaagccagctatccagaaataggttcatcccaaagctgggaaaacaaatgtcacacacaataggagtccatttatattcattgaggaagcatcagtcgaagttttagaacattttaaaagaagcatattttgttacttttgttatatgcagtaattttttgaattgccaattaaagtgggcttttaatacttaatacttatttgtaattggctcattattcttcattgaaagtatttgagaacatctggatcttaggtaaattcatggatttataacaacactttttcctgttccttttgtgttttttctgtctcagtgaaaaaccgttgtctttttccaaagccaaaaattcggaagccatccttgatgcgtttttctcccccgtctgccccaaactaattagtcaccaagttccaccaactcttccccagtagaggttcccacacaccccttctccatacccactatcaccactctagtccagacacctagttaacctcacagcctcctcgctgttcctcctgtccccagcctcatgcctttgagatcatattccacctcctcagaccggtgagagcatgtcattcctcaccacctatgcctttagtcacttgcctgtgccttggataaaggtgcactgatctgtgcggtcaaggggcctgtccttatccagccccggcctcctttgctggcctccctgtcatcacactgctttctctctcaaacacctgccacactgaacctcttgggatctttatataaactcttctctccaactggaacacttctgcagccatcccacctcagctgcacccccaccacccctgtgggtcttcttacctgtgtactttgtcctgattcttaaggtcctcagcctggctcttagtaggtgcttgagtcagtgtttgttgggtgaacaaatgaaggaagcataaccagtcaccgtgctgcccctatgggccaggcaccctctgaagcagcccagatgtgtacagtgttggtgacccattaacagctgggattacagttgattcacagttgaactctgttccagactccagaactctgcgagtggagggaccgtggccttgtcagtttcagaactccagggcctcatgttttacctgctgcttctcattttaatctgcagggactttggaatcagaagatctgggtttaggtacaagctttatcactaactagttttgtatctttggactatttgtgaaatgaggatcatggatatattgcacaattcaaataagattttgtatctaacagtaaaaactgcaaagcaccgtgaacatagtaaatgtaagatcaggttcagatacctcaggtgagacctgggtcgaaagccttaaaaagtagtttatttgcttctccagggcatagcgacgtacgtactttgtctttttcctcagcactgaagtggacttttgcagctaaaacttaaaggatttgtgtaaggaatgactggatcttctgtccccatctgtcatctgggtgctcagtctgacccctccccggactctcatttgcccagtgataggtggtataagttgcaggaccagtcagtagcggaaaggagtttgtggggtggatggggacagcttagaggttgctgtgcccggctccaagtatcaggctctgtggtagtggggaaggagagggagtcgttttgccagttaacctaatagcacagctggtgtggcgcggggggcctgggttaaagccttgaacgggccattagttcctgtcttcttcaaagtagttcatgttgtgaagagaggaaggcaggcaaataaacactgaacatagttaaatgtaacgagaatatttttttaaatctatttttctctccaaatggagatgtgacacctatttgtgaagagaaatgcctctgcctgtctttctgggtggagacaccacaaaggtggcgtggtatgtaaccgtggcacacacacatggcaaagcagcttttattgaactggcttgaagagacagatgccaacatgaaaatcaattgtccatgtgccaaatgaaaaacgtgcttgcttttcggtggcttctgttgccttggacgtcttgttggtatcctgacaatgctgtagttctctgctagctgacgaggcacctttgatgaagaaattaaatttttctgtaattgattttgtgctttcctgcatgggcctggccacgcacgctttctgtgtttgctgatttctctttcatgggtaggatgaatggtgacttgggtttcatgcttgactctactttttccaacaggatttaaagtttctaatgcttacattgcagaatttgttgtgtcccatgaagaggaaaagaatacacgattggaggctaaacaagatccatgttaaaattcctcccagttttatttccccaaatttcctagttttgctttcactttttatttgactttgtttctaactcagttttgtaacacccttcaaacttagagatatgttttcattggatggtactttaactggacccatccctggcgattttggagctttgacaacattgccctgtttaagttcatggagcttcatcactgtttcctttatgtcgtctacccccaaatatgctttaaggactaagtttacttttaaaattaaatacagtttcattctatttttgaaaatgtctaaagttaggtctctctcttatccagggaagaatttttctgtattcctactatacaaaaatattcattttttccttcttttatatagaagatgtgatttgcttataaggatgtcataaatcagtttctttaattttttttcatctgctaaggtttagaaagcaacattggatctttgctgtaaagattatctcttttacaaataagagaatcatatatagcttttttttttttttttttgctgagacggagtttcactctgtcatccaggctggagtgcagtggcgcgtctctgctcactgcaacctccacctcctgggttcaagcagttctcctgcctcagcctcccgagtagctggaactataggcacatgtcaccacgcccggctaatttttgtatttttagtaaagacagtgtttcaccatgttggccaggctggtcttgaactcctgcaagtgatccacccgcctcagcctccaaaagtgctgggattacaggcgtgagcctctgtgcctggctcgcatatagcattttataaactaggtaaagtctccgctaaccaaaccacagataggacactgctgcagaacacactggaaaggtctggaaaactcacttatctaagaataacacagggacatgttttagaaatgctagtttgtttaccactgggtctcaagcacctatgacaatgactggcttgtcattaggccaactaggccagttttgcaagagggcagtgaagggatttcttgtttttaattgatagaagaaaaatgtctcttggcttagtctttaacacaggtctccgtaatagagattgaagtagcgtttttcctagacttacgcgaacactgcttacattgccatgtaacaagaatggattattggaataggaatttttcactgatgctaatattactattcacaagagaatgcccctaaataaaacagtcctttcaaaatgcagactgaatgactccagggaatatcttggcagcccaccactacccctgtctttagctattagatatacaaaatgtggaattcaaacaattatcaaattgtattagaatccattatctaaattaacaccatgtaacgttgaaatgaacttgaggacaagggattcgcctcttagcatgtggtggaaacgcgcttgcccgggtcgggctcataccctcacacaagctctggggcagcagaacctgccagggcaccatttcctaggccagggtcctgcgtgctctaacttacagctagaaagggaacagtcttctctttttttttgagacagagtctcaccctgtcccaggctagagtacagtggcgtgatctgggctcactgcaacctctgcctcccaggttcaagtgattatcctgcctcagcctcccaagtagctgggattacaggtgtgcaccaccacacccagctaacttttttggtatttttagtagagaccgggtttcaccatgttggccaggctggtcttgaactcctgacctcaggtgatccacccgcctcagcctcccaaagtactgggattacaggcatgagccaccgtgcccggccaggaataggtttcttagttcagactggttttcctttaacccccacaaaaaacctaatgggttgtttcatccattaagacaaatgtttatcaagctactcactgccatgggtgcttgagatcccatggtaaccagaagtcagggcccttctcctcacattgagagtctattcagatactcgatggggattttgagatctttctctgtctctgtctctgtctctctctcaatctttctttctctcccccccgccccccgccccccccccacacacacacaagcaaactctggggaatctgccagatcaggaaggatgtatactgcttcttaggccgcccagagctaatcagtactatagctgttggttgagtggcctaaaactgacaagctgagcttttctgagccaaataacatggtcggccaattatttctggaaccatttatctggaagggcacaggactttctgcatagtgagctaagtgaggcaggatccccctcagctctagctggccttgtagaggaggcgtgggacaggcaggcccagcctggagccaccactccctaggggcagcctcggaaggcgtgccaggaggctcacaggtgtggcattgcacctccagagattaaccaccatccaaggacttgcagcattttctggcttcactgatgaatggtttgtagggaaacctggcaagagaaattagtttggaaacttggagtcaggaaataaatggtggattgcattaaaaataatatgaataatagtagctatcatttattaaacctctagtgtgtgcaagcactgagctgtgtgctttacacattttctcgtttaatcttacaaggtaggctcagttgtcatccacatttttcagaaaaggaaagtgatgctttgcagctactaacgtgcccacagctgctgaactagtaagtggtgaagacacgatttggcccaggcagttggtctgcagagccctcactcctcacagcttcgcagtggctgtggagatggacagggtggatgcgtctgatagacatttaggccatggaaataattgtgctttctggcctagtagactcgtttttcttccttgccttgctgtcagctatcagttgttccttctcacaacagtcctttcttggacagctgtctccttttcctcagaaatgattctttggaaacaccgtgagatgaagaacgaaacaatccaatttattaagccacttttgtaaagtaagagcaaatgggtctgaatgaagatggtttatttttcactaagaccacatgtttttggttctaactctatgccagataccttgcttgggcagatgagaggagagtgtgttttaaagcctccagaacttacagtctggcgagagaaacagttgcacaaaaaacaatagcagtatgctaactgcacggccacagctaacatacgtggtgcttttcatgcttataaaagtgactgctttcctggaagggcaaggaatgtcatggaagatagcactaacagagtcatacagaacaggtgcacatcagctgtatgaaggcaagtggccttctaggcacacctgtaaaaacagctggagcaaaggacacagcacaccatcttgttttttaagctatgcctcccattagtggatctttccatgatatgtaaaatatcagagtgcactgtacataataagggtcaacattgttctggaaaatgtagagtgtatgtgaatagtatatgtaagtatgtaaacatatgcacattggatcatgacataaaatatgtctctaaagtgtggattgttgaaaaaaaaaaaagtttgaaagtggcctcacaaatcaacctctgtgagcctcactgtctttaggttgatttgaagctgaaatgggctaataatgaacaagctgttagcatataatatatgctcattaaagatcagctgctcataggccagggaatggcaccttacctagaacctgagaatgcagatttgctgagtgactggatgtgcagggacttgcaggtctgaagcaacccaggggctacagggagctcagagcctaagtgacagaaccagaatgggagcacctggtgactgcgtgtccagggtagggcggcagactcgtgtgctgggctaagtttggccttcagccagttgaggagtcaagagacagtgaatggtttttgaatgaacacagatatctgcgagatgcagaaggcggttcagtgcccaagtgtaggcaccagccttgggcacaagcagaagattttcttcttagaggaggaaaaccaataagcctcgggcctggctggagatgctcaaagcttagagggcaggaagtcgtcaatgctggcttttcttgtggtgtgggtggtcatttcttgacagttggtagctgggctacagatggtttgaagaagttaaaattctaaaccagccaagtaaaagggtacctcaagtgacctctagactcagctgaatgcaggaactttagtttccaagtccatgccttgggacatccactttggatgacacccactggttgcagtggagcctctcagaagctgtctggccagatttgcccgggtctttcctacacgttgtttaggtctcagctgaaatgtgacttcttcgaggaaaccttccaccatcccagtctaaattgggtcttcccctgatactctcatagcacctgtgctgcttttattctccacgtcacacactgactttgagttatttgtcagatgtctgtgtgtcccgctggaatgttaattccatgagggtagatgttgcctgtgcttggctcattcatgcccctggcacctcgtgaatgaccaagaaatggaagagaaaggaggtgatatttagttgactaagatgttacttttcttgtctcatataaagttataagttgcttcgtaattttagttcattatttttccctattgataggcttttattttctgttcaactaaaatttcagttcctcgagggcaaggatcacatcttttgctttttaaaaaatactctcttattcctaccacagttccgagaatgttagagtaaaataggtgcatgctggtggaagatttgtgtgacattactgtggattgagttaccagtttgatagctcagatagaaccccgcgcagtgactaaagggctcacagaatcactataaaggcaatagtaatgcctttgtatagggttttcatggtggttttcagtttagcagagcatttgtgcatggatttttcttatttgactctcagggtgaatgatcttgtaagccagagcaagatgtgcgttcttcactttacacaaaggagcctgtggacccacacagcgaatgggagacgcagcctctaaacagatctgcttccaaacaaatccatagggggtgtgttgctcctactccactaccttaacttctctctaaggatttttcttttgcttgatttttttttcccctaaagggcagaaagggtagtctggttttaacatcagaagggtatctctgcatttggaatgtggtagtacaagttcggtgactgtatgagcatacagcgcaggactcaaaactaggaaattccctgatcagaaccctggtgcagatttatgttacggatgaatatattaatcatattttcatatgaggtttcgaggaaactttgttttgtatcatgtagataatatctaatttagtgctttgtctaaagtttgaattttcccatgttagatatttacttgggaccctataattccataatacatttagtaattcaatatactttcacaatatataggaaattcattttatattttctgaatttccctaaattcagaaagcgtggtactctaaactcagatggcttatgactagaaaaggtcacaccttttaaagacgcagctgcgttccctcagctgtcaggcttgctattcgcaaactctgttacaagacaccatcttagaagaatgttctgaaaaaagcaagatgcaatcaaacaaatatgtcaccataaataggaagaaaagtcttagttgaaatctgatttcttgggaaacattttaaaatgtatttctttcaaaaataaaaatataacaaaacaagaaaagaactaccttcgaaataaatatacttggaaattgcagacttgatttagatttcttcctaggaaagaaaaacgtttaaaccagaatcatagacacctatagctggaagtgcccctacaactattgagcgcaggtgaggaaactgaggccaaaaaggtgaagtcactggctagaatctgcacagcagacgtggaggccaggatgagatcctcgcccagtgctctcttggttaccatgctacctgtcctgtacccttgtttgaatctataatagtgacaagaactggccgggcatggtgcctcacacctgtaatcccagcattttgggaggctgaggcaggcggatcacaagatcaggagtttgagaccagcctggccaatatggtgaaatcccgtctctattagaaatacaaaaattacgcctgtaatcccagcactttgggaggccgaggtgggcggatcacaaggtcaggagatcgagaccatcctggctaatatggtgaaacccggtctctactaaaaatacaaaaaaaaaaattagccgggcatggtggcaggcgcctgtaatcccagctactcaggaggctgaggcaggagaatcgcttgaactcaggaggtggaagttgcagtgagccaagatcgcgccactgtgccactacactccagcctgggtgacagagtgagactctgtctcaaaaaaaaaaaaaaaaaaaaaaacaaaaattagccaggcatggtggtgcacacctgtagtcccagctattcaggaggctgaggcagaagaatcacttgaacctgggaggcagaggttgcagtgagccaagagtgctccactgcactccagcctaggcgacagagcaagacttcatctcaaaaaaaaaaaaaaaaagctactgcttgttgaaagcttcctgtgagccagcccttttatgcatgtttatctccgttaatcctcactacaaccctatgaggtagatatgattgcccccattttacagatgaggaaactgctaatagacatgcatcgtttctgtatttaggatgaatagaaatacttcatttttagctaacttctgtcttctaattttttatcaatttgtttaggagattatggcaatattcaataacctttaaaaatatccataatggattacttttttagtaggattagctagtgttggcatttaattgtgattttctattatgtgtcatgtacctacctcctaactggtcttctcacgtgtaacctttctcttcctcttcaatcctttcttcatgatgcttattacagtagggttagctttcaaaaatgcaacaggcatggtggcccacacctgtagtcccagctaattgggaggctgaggtaggaaaatcacttgaagccaggagttcgagaccagcctagacaacatagagataccctgtctcaaaaagaaaacaaatgcaagtcaggtcataacacttcctcttacggcagtatatggtctatgccattattacaccaactgaaagaccagcttttcacaggactgcagatacagaggtttgggtgagccatgcagcaattcatctgttaacaggagctgtacctgccagatgaaatacttcatattcaagagagagagcgtgaccaatagaaaaagaggcaaacgatataaacagacatttatagaaaaggaagtaaagacagctgtttaacatgttcacatttactcttgataaccaaaataaaaacacaatcacaaattataaaatatctctgaaagaatacattgaaaaaccatttgcctttggccaggggaactctggcagaagacagggatgtgagaggtacttcccataatacaccctttttaaccctttataatctgtacacagttacccaagtgctggagtaatgtggattccagacatttaaattaaaaacatgtagaaataaaaacttgttcatcccagctggaagcttcatctgaatttataggctatccaagtgaaaagatatttttgggagtttataaaccaaacattaacattataatgtcttaactttttttgtatatcacatcacagattataggacactttgacatattatctcagttgatcctcacaggatccgggactgtggctcagaaaggttatgatttgcttaaagtcacacagcaagctgtattcaatacccactgcagtccatttatttacatatctgtctcccctactagattcagagctcatgacgcaaacaagaccacaatctacgccttccattcccagtccactgccgttagatgatgctggcttagaaaggagtcagggaaatgtgtcagcttcctctttcatggtcttggggaacagggaaaggggtgagtctcaccaaaaatagaaaacaagatttcaggaagctcttttaagtggtgccattgcaaaagtaaataatacaaagaaaaaaatagctttcaagttgtaatttctatgtaaggaggtagattccacacccagttgaactttgtccctaaggtatgggaaattgatactgtgaagcagcctcatttgaattcgctttttaattctacctccttttggaaactccatctcctttttgcaaatgtgattttatgtgaaatgccagtgacaattgagatagttcaagtggaacactacatatgtatttttaaggactgagtaaatagaaaaagaaataccttgcctaggtaagaattcttagcactcatttgaacaaaccttaagcctataatgagtgtcacagaggccacaaaaacttaagagtatcgtatactgctgggcgcagtggtttacacctgttatcccagcactgtgggaggctgaggcagacagatcatttgaggtcaggcgttcgagaccagcctggccaacatggtgaaaccccgtctctactaaaagtacaaaaatcagctgggcatgatggcatgcacctgtaatcctagctactcaggaggctgaggcaggagaatcacttgaggttgggaggtggaggttgtagtgagatgagatcgtgccactgcactccagcctgggtgacagagtaagactccatctcaaaaaaaaaaaaagaatatagtatattatcagagcttccaaaccctttggcatggacaccttcatggttggagtgaaatttaatgctaattaaagggcctgtgttattttccttaactaaggaagaaaaagcaatcgttcttttcaaagaaagtaaggggagacccacatgatctctatgaaattgaaacacatttttttattaaacaggactctatctgaaacacttgagaattttatagtaaagcttagataaatatttcatgtaacatcttaagatgcaatcattcatagtaattttagtgctctgatttctgtttgttttcagattgaataagcaaatgttttctatgatggtttatatctggaagctgccaattgagcccaatttcataaggcttatctttataaataagttaaataggataataagaaatagttcaacttacttttattttatgtctatctctttaaacagaagcaatgttagactatatctctttttttaattgaaatgtaaactgtggccacctttgtaaatacaatatgccatttaacctccttaagccaaacttagatctgggattatcttaccctccagctgcctcagtggattttctttcgaagctactgctttaggttctcctgaagcagaaacctgcccgtctccagctagagccttcacctggtaacgtgggcccctctcccgaacataaaaccctgtgttctgagagttgtttttcaaactgtcctttgttagtgtgctagatggataatgtcagctttttctcaaatctatcttgatttggggtcctctttgtcctaatgagtatttcacagctccatctatgaactcgcttccatttgcctggactcctgagagtggaggtacctggccttccagtgatgcataaagatgtgttttctttatccatttgaatcatctacccaccaagcacctatgtgtcgtactcagcactctgttggccgcatgaagaatttaacatccattcatttttttaaaaagcaatagttttgttaaccaccacgtcccacacgctctgctaggcaccaaggatagtgaacccaggtgtgattcttgccctcatggagctaatgttttagtggggaagagagatgataagtgagtcaaaataaaataaagtgattaccagtgattatgaaaagtgctatgaaggaaggtgagtgggaaagggcaagggttggtgtgacctctgatcaggtgtcgagggagggctgagggatgagaaggacccagcagtgtggagagcagatcgtgggcgagccgggaggagggaacgggggagagaggctttgctgagggaaggagcacgatgttgtcttctaggaactctgggacctgcagtgcagtggagggggagaaagctctaggaaatggggctgaagggagaaaggcagcagccagagctcacgaggtctcacagacagggtcacgtgtgcattttattctagcgccagtgggaagccttgatgatgttttgttttgttttgttttgtttgagatggaatctcactgtatggcccaggctggagtgcaggggtgccatctcagctcactgcaacctctgccttctgagttcaagcgattctcctgcctcagcctcctgagtagctgggattacaggcacctgccaccgtgcccggctaatttttgtatttttagtagagacagggtttcaccatcttggccaggctggtcttgaactcctgtcctcgtgatccacccacctcgacctcccagagagctgggattacaggcatgagcctccacgcccagccagccttgatgagttttatgcaggggagagatatgctctcatttccttttatattcctgaaagttattctggcacctttgaggaaaatgaaccaaaaggagcaagactggggttagcaaggctgagtggtcggtggtacagctgtggtgtgggcaggagaagacacaactggggctggctttggtagaagtagaaataaggaagaagtaccatgcacgatctatgtcggagcggagtcaccaggatgtgctgatggatggatcacacttagaggaaagaaggaaagggtggccttgtgggcgtcccatgtgtctgagggagcatttggaggagtggcagtaccagttacagaggtagataagtctcaagacccaacaggtttgaaggagaaagtcagaggttctgctggggcgcagcagaatacagcgcaagcctgcagttgttggcagttgacctgtaaggggtagtgccgagtcaggtattcagaagtctgcaggctctttaggagccaagtttaatggttactgcttgaggacaccagaggggagaaaaacagctctgtgcagggaagagctggtaccctgggtctgacgagtgggatctttgaccagagagctgcatcccacagattgggcagggagcaaaggcttggagcaggcacgcacggcatggccagcctttcaggggcagagggtttgcagtacagcagtcggtcactgttgctttttgtagggattttatctgcaagagaggttaaggtcatttgccttttctcctccttctcccctccctaattgaagtccacaagccattggcttcctgggaatcctcttgggaattcagggttaggaccagggtttcaccagggcaccctccagaccgtccacgctgaactgagatgtctttagctattttttaggagaatcttatggtaccagccttctcccctgccacctgccacatcagtccatgtccatttttatgtatgcagagattatgaaacacctgcatttatatgtttccatttatttcccacttaggttttatggcaggcacacaaagaaaccctcagatggctcagtatggacctcaacagacaggaccatccatgtcgcctcatccttctcctgggggccagatgcatgctggaatcagtagctttcagcagagtaactcaagtgggacttacggtccacagatgagccagtatggaccacaaggtaaaaccaaagcttctccaaaatgcatggcagcaagttgtagaaattttcttaatgtgctagtccttcaagattttaatattgtaaacatatcgtaagatccattatctgttacctgacaggtttgtgaggttcatacaagcccacagtactttagctgcccataatgatgggaggaataattacagccactattggtgaaacatttatgtatcagacacttgggtaggtgctcatcatccttgtgttactagtgaagtaggggacccctatcttctgtgacgtggttctaaacgtagagaaaaagacacaagccacgttctcaggtttctgatgtcaaacttgggctttgttgggttggattctggtttggcccatccctcttagtgatcaccgtcaaaaccctgagctgacggctcaggacggcattgccccgcacatccctcccagtttctctccgaggtgccgcatcaggtcagcagtagttctcactttcccagtcaaccccagtgtgactcttcggagacaggacaaagcctgaaatggttacatgtctttcacaagagaagataagggaggagcagagaactagtggaatcatgtccagcatgcaccattggccttcctccttcctggaagtggatgtaggttttgtcagatacacacagcatccttttatcaaggtttttaacctgatgtgtgtaggtatacatatatatatgttttttctaagtcacttttagcaataagacatttgaatttaccaccttccttatattttgtttatttaaattagacatgagtggataatttagagagaatgagataatctggcacaattcccagagttctctcacttctgaaaataccaggaacattccaggtgaagatgatgagtgccactgggaaactgtagtaaaatgtttaccacttctacaacaaaaccaggtttgcctggtgtagcgccttagtatttcctagaggccaggcaaatagaaggtgaggcccagtcacctttttacctgctggttctcagaaaatcgcatctttctgatgtatagtactttacagcttgaaaagcgagttattatcttgtgttctgaagatgtttttccgaaagatcttaaacagtttcagtgctaccaatggagcattgtttctttgccttagagggctttgttatatttactttccaaatatttctgttggtaggaagactatggggatacccaagaaagcaaacgtctgtatagagcctctcctgcctttgttctaggcttgtcctgagagtgagacttggtgttttgcccaattctctttatatcacatcatcaagagttttccatgttagtaattccagtaagcgttaggaatttcagtcccagttgacagtaatggtctgcttgttccctgtcagtgcccggtaactatgacatgtagcagtttgttgcagagcagaggcaggactgtgggtcacccaccatccttactgaacgtggtgggtgtcgtcaaagccaggtttctttagctgtcatggaaagaagagagcttagtggcagttggaaaaacggtttgtaacttgtggtaggcacagaaaatgcgggcttttgctcctaatgtaattggaagcaagatgcagaccttgttctcagaattgggtgtggctgaaggtctaggagttaactcttaagtccataagcccttcctggactctgaaatttgtctccatactctcaagtaattcaatcttgtagcctctttttctactcatcatatgtgaagactgagccttgggctatctagtaagtcttttgtgaacaactaaggaagaacttttgctataggaattaatagcagggaaggaaattactatagaatggatttttttttttttttactaaatccctgtttttcagtatcattgaatgtgaagactcttaatttaagagcactaagcccaggagagttcttatccaaactgctgtgtctccttggaaaactgcttactctttctgaagttctttttgtctagaaaatgagaaaatgagattatattatgttggcatttgcttccacttctaatgttctacgaataaagccttgcttcagttccaggacctttactgttacggtagcccactgggttcctgcatcacagttcagctttttgtttgagtgttttaaggcatgaaccttgagtgtaggttaatagtagaaacgatctgaaatgagaatgaatattcccacactcagcactctctggtgcctgaaagttgggcacccctcccagcaccatgcacccttttctcctctcctgagtgacactgccaccttgttcccctccaaggcatatgtgctcctgggttcctgcatcagctcggagcgctgtgtgctgtgagggtcctggtactctcaatgtccaaatcaaaatcatcaccttttccgccttggagcctcctgtcctcagcaaacactcagcaacaggagatcacatttgcaatgtgttgttgagttcaataaatactcttcactttttctgtctttgttatccttttagaaagggatcctaataaagggttttttttctttctcctcttgattaactactcagattattagtgacatattcagcttccttctttgcattagaagtgttcatatctctggaatgattcactcatgcagccacccaagatgtcatcagtctcctttttctgtttttgttcttaacttcatggcttgcttctggttttgcttttttaaagaagtttcaaatatttcacagccgttttactcatattttatatgagaagcttttccaaaattgttagtaataacaaccagcatttattgaacatgttactatgtcctgggtcctattttctaagtgttttttatatattaactcatttaatcgtcacagaagttgctgttattactccactttacagaggaagaaactgaggcacagaacaggtgaatagttttgcctggatgcacagtgactacaatggtcaagccaggatccaaacccaggctgattcacccattctcttaattaacgggaagccctctgaggctgtctctattttgtaaatgagaacaccaaagccttgagaaatttaataattcggccatgatcccacagctgttacagtaagtggctgggccagggttcccaccagcagaaactgacttacgaggggcctctcgcgtggtcattggcggtgttgcttcccacacctgagctgcactgccttctcaccggttcattcattcagtaagccactagggatataaaaccaaaatgacaaataacttgcctttaaggagcaagaaacaggcatggaaacatatatataaaaaattactggttgggcatggtggctcaagcctgtaatcccagcactttgggagtccgagacgggtggatcacttgaggtcaggagttcgagaccagcctgggcaacatggtgaaacactgcctctactaaaagtacaaaacttagccgggtgcggtggcacacgcctgtggtcccagctacttgggaggctgaggcacaagaatcgcttgaacccgggacgtggaggctgcagtgagccgagatcatgccactgtactccagcctgggtgacagagtgagaccctgtctttaaaaaaacaacaacaacaacaaaaatactaaagagattaagaatgttgctcatgcccataatctcagcactttgagaggctgaggcaggccgatcgcttgagcccaggagtttgagaccagcctgggcaacatggtagaaccccatctctacaaaaagatataaaaaaattagccagttgtgatggcacacacatgtagtcccagccacgcgggaggctgacatcagaggatcacttgagcccaggaggttgaggctgcagtgagctctgatcacaccactgctctacagcctgggtggcaaagtgagaccctgtcgcaaaaaataaaataaaataaaatttctatgatgtgaagaagggggaatgttagaaatgtatattagtactataaaatctgaatttttaaataaatgaagccaatataaatgtgtaaaaatacttaattacagtatattttatgaaatagcactttgccaccttcaagcaagcacatgtaataataactacccttgcaaagtgtttgcaaggaaagaggactgtggggacttgctttaataagtagaaaggattatgtaattaacatgttaattattaataagtgagtttgtatgggaaaaagagagctaaaatcaatttcatgtccatagcctttttatttcttaaggacaaaactatcttgtttgttttttgtgttctctagaggaatgtctatcacactgactatccagaaatactttttgcatgttgttattagttacaaaatataaacactcgggccttagttttgctgtgagtaagtagagttaccttgggcaagtaacagtagttctgagtctagattgctcccaggcctcactcactctgtaatagcctatgggagtctgggaagggccaccacacacagccatatgggtcgtgctgacacctgggtttatgcctgatttttattgtgtgtgtcttagaaagcagaggacttacaagtaggtgtaaattatttctaaattactttggtaaaggtgtttttcagaagggtttaaagattttttttttcactaaaataaattagatgccatctagaaattttccttttcccttcattcattatatgtgtctcataagttcaacaaaggcaaactttaaatgatattcagttgaaatgaatacagttccaaactactgaattacacagcaatactcttaaattgtggttctagaggggcaaggtctagatgtcaagagttgtggggcccctggctacttgtgggtaccttgtaggccctgcagtcactgagacccaggatttcagtctctactcttctaagttcagaacctccatctttggttggttggttggttggttggttggttggttggttggttagttggttgttgagacagagtctcactctgtcacccaggctggagtgcagtgatgcaaccttgactcactgcaacctcgagctcttgggctaaagggattctcccacctcagcctctctagtagctgggaccacagacatgcaccccacgccgggctaattttttttgtattttttgtagagacaaggtttcagcatgttgcccaagctagtttcaaactcctgggctcacatgatccacccacctcggcctcccaaagtgctaggattacaggcatgagagaaccttggtcttattattgaattggcttaaatgcagctgctcttctgcagatgtggggtctgtctgccacatagattcattctgtgcagtcaaaagacttcccctggatggtgatgcagattgacaagatcctcttctctgacgttccaaagactagattctgtgcaggtcactcgcccttcagtgtgctcattttattgttttcttcaaacaggttgatgcacttgataaggccacagcttcttcttatcttaaccttgttttttggttaaatcgacagtgcaaagcaaaaggattaattccttcttctatactgttatgttttactaaggaaatatactaaatctgttttgctaatattagaaaaaacaaaaattgaattggattatttcatagcaaaggataggtgaacgtaatcaagtcttcttgtgatgcctgaatctagccttcaagttataagacgtaagcgtgaatttttcttagactgataatcatcatgattttgataagatcatcacatcatgatcttaacaaaacctgggaattagggagaaaaaggaaaatatacagtacaaatcaacttaaaatgaaaaaagaaaaaaatcaagcaactttaattttgactcttgtgaggctaattgttttactgcagtaattaacatcagcagtacttaagaggggcacacctcctgccctcaccgtgtgaccgagcgcaccaccgtacgcaccatgtcaggtgggcttcattaagacagcggtgggtggcacctagagaggcagggtgtggacatgcagcttcacttgccctcttagcaaggtaccttttcccgaggtccatcgctcttccatttattcgaatgtttaaaaggaaattacctgttgacacatttcacaaatctgtcagagctgcaccaggcaccctggagaagggtccctccacctgtggttagcggcagccgatcgggaccctccctggcccgcctgcagggggtgcctttcccctgcagtctgtgtggggcatgcagtgcacagcagctgagcctggagacacagcctctggagtgtgcttctgatggttagacgcattcggttcttaccatagagacttgactgttcacactgcagttgactattgggttgggttaatagctatatatatatatattaaactatatatagagagagctatatatataattattattttttttttttgaagatggagttttgctgtgttgcccaggctggggtgcagtggtgcaatctcagctcactgcaacctctgcctcctgggttcaagcaattttcctgcatcagcctctggggtagctaggattacaggcgcccaccaccatacccagctaatttttcatatttttagtagaggcaggttttcaccatgttggccaagctggcctcaaattcctgacctcaagtgattcacccgcctcagcctcccaaagtgctgggattacaggtatgagccaccgtgcccagcctttttatatattttttaatgtcagtgcttaccttttatacattctatttaaggaataaattgcgtatctgtgcgtgatgaaagtaaaactagggatatagtgcaatatgatgatgtaaagatagtttctcttcactaattataaagttattagaacactttttgggccaggtgcagtggctcacgcctgtaatcccagcactttgggaggctgaggtgggtggattgcttaagtctaggagtttgagaccagcctgggcaacacagtgaaaccccatctctattaaaaatacaaatattagcctaatgtggtggcacgcgcctgtaatcccagctactcaggaggctgaggcaggagaattacttgaacccgggaggcggaggttgcagtgagccgagatcacactactacactccagcctgggcgacagagtgagaccttgtctcgataaaaataaaaagaacactttttgcctattccttggctgattttatctattcattgtcagttgtccaaccatagttactatatttttttccctgcagcaaccacatgagacagagaatcttttattgtaccctttttatagaggaagaaactgagctttggagtaacacgtagctttccagaggtcacctgcccagaaccagatggcgagacccacctcctgggaggcctttcttcttcacttgctgcctcgatgtcagatgctggcctctgagcatacccacgtgtccttggggtccgcctctgacgttagccctggtccgggatccgcttctgccccgggagaggcagcggccttccacatggctcccttcccctcagcactctgcagagtcctccctcctgtgtttctcatcatcactctcgtcacctcatgacatgttcttgatttctttacttgcctgtttcctgccaccaggacataagctcttgtcttcattcactgctgaatccccagcatttagcacagagcctggcatgtaagaggcccttaataactctttcttaaatgaatgaattttgctaaggcagagtaatccagagtcactgatactccgtcccctcctgccttgaagcttgaccagtattgggttgaccattcgatgcctaagagcagtacctggtatattatccttgtggagtgagactaaggataatttttgtctgtttctgtgcttccatattttctgcattgagcgtgcattactttgtaattaaaaaggaagacaataattgttgtaacataaatggaaaaaaactaccaaaagtgaaacattgaagtgacactgtaaggtaagataataggtctttctccttcttttacacactttgtgtaatattgtaagttttacattttaaagaattttaaaatgcatattgacctaagagaaatatggtaccttatgtatagttcagaaaacaaattctctctatttattcccacaaataggatttaatgcaacttgcggtaagtcagctttcattttgatgaacctgtatttgtgatcatctacttgatgcatttctctggctgaaagagcagcattgtgtgatagatctaagtagaaagatagaattgaaagaagctgtattgaaatagaactttatttttcacagaaaagatcttacttaaatatgataaccagcaaataaacacatggaaaatcctcaaaatttttttcattagggaaatgaaaactaaagccacgttgatttctattacatactgattcgaatggctaatttttttaagttggaatatcaagtgctggcagttagaactctcacacagtatttgatgggaatatatacaaaatagtacagccacagtttggcagtttcttataaacacgtacttaccatacagccagcaatctaatttctagggttttaccaagaaagatgaaacatattcctaccacacaaagacctgtatacaaatttttagcagctctactcgtaattgccaaaaactggaaaccatatccaagaatggactactactcagcactgaaagggaatgtacagatgcatgcaacggtgtggatggatgtcaaaggcataatgctaagaagccagccacgaaagcctatactgtgtgactccatgtgacgttgtagagaaataaaatgacatgaacggaaatcagatcagtggttgccagggggtggcatggggataaggttgacttatagaaggggaagagggaacttttccctcctttcatttcttgtgagagaaatattctgtaccttgattgtgctgtcgattacaggattatagaattttttatatctcaatatagacatgacaaagccgggcacattggctcacgcctgtaatcacagcactttgggaggcccgcgcgggtatattgtttgaggccaggtgtttgagactagcccgggcaacatgacaaaaccctgtgtctactaaaaatacaaaaattgccctagcatggtagtacacacctgtaaacccagctacttaggaggctcaagtgggaggatcgcttaaactcaggaggcagaggttgcagtgagccgggatcacgtcactgcactccagcctggatgacagagcaagactctgtctcaaaaacaacaacaataacaaaaacaacaacaaaaaaaacaatattttgtagtaactgttataaaaatggtaaacatcactggctacaaaacaagataaatgcatatttagccctaattcacaactgcctttatcatagtatgtagctaattatgcatttcttttttccacaagggtaagatttctgatttattgcattcacctccattttctcctccatcatatagggaatgacgcagaaccttgcccatagtagttgttcataactgttgagtgattggaacttagaagcaaaatttcgtatatgagtggaaacatttagtagtttacaaaaagcagtaagctctgagtatgcattgcaactatcaactttaaatattctggagtcaggtatagaaatttttgtgatctgcctgaaatgatgatggtgacttgaatagggtctagcttctgcttcctctctctggtgcttgaatggaactcctggtgggtagaaatctgaattcatttggtgaccaattttccaaagctagtgtgccaagatgaacccacttgaaaactgtgggtccttggacttggctgcaagaccagtccagctgaggtgggctggcccagcatctgccgccttcattgtgcttaatgctggatccatctgttttctgtcaaagccagtgccaacaaattactaacctattagagaaacatggaaataagattgcacttctcattcctggcttttcctctcatattttgcttggcttacatatttggtttttgtttattttgggaagaaagatacgttatcgagtagttggggggggcatgaatcatttttcaccccatgcacacatttttaaaagatggggggggtgatgttagtgatgttgttatggccattgatgacgatggcagctgtcatttgttaggcagtgcggtgcctggcgctgtacttgttactttcaacctcttactcattatcgtagtcactttacagatgacagaaccacagttcagagaggttaaaccacttgtcacgctgctagggagtgtcagaaccagtattcacacccagatgctgaagcctgtgctttatccattgttgccttttaaaccgttttaagcctttagaaactatttttgtccaggcacgtgagtctaatgaggaaagtttcaaagaaaagaaaaggggactttgtatttcttctatccaatagaggcttctgtaattagaacatttttccttgacatgcacttttgagtgccaattcatggaatcaacccaactgattggagagaaatagattggcacccctggcctaagcgcctttctaagcacaagtgcacacacgcgtgtcttggtgtgcatagctgtgctcgaacgcatgctcccccaggttgcagatgcttcctgccaggagacgaagaccagctgccgaactgggcaaagctattgaaacacagctcctctctctttagtatataacatgagtgagagatggaggtagggtacagagtaacttaacatctcagtagtttctttcctttgtgttcattaagatacagcccttgactcccagttaaacccaggaggttggagtgccagcatttccgcattccagctataagcagaattctacaaactcagaaaccttctttctctaataaaaccgcatgatgggtatagtctaaacgcttgttttctaaaacaagactaaaacgttatttcatttccttctaaagcaaagggcacataagttttcactgaaaaaggtttcttaccaactgagtcacttatccagtgttaggggagggtggaaactagccctcaagtaatggcatgaatatatgaattaattacttgtgcattcaaactatgaatgagtatatttatttttaataaaagcaagagctaagaaggagcactgtatttcactgatcttatcagatcatctggaagcgaaggggatgtgagcttggggaggaggaggaggaggagtctgaattccttctcacagggaaaagtcgtgaggactgggactctgggtaagcgtgggaagaggaagggcccagcagctggcccctgctctgtgcccacctaccagggtgcacagaaggtgccttttccgccgagactgcgtgatgggaaaacagacaggggagcctatgtgtgtcccgtgggatgggagattcagaagcaacttaagaaatttttgtaaagaactttgaaactgatgaacagtggtgtttttttattttttattttaacttgaaaacaaagttttgatggtatctgcaaacttcagctgtgcaaaagcagtgcctcttcacgccgaagcagtttgcctttaaggagctgccaataaaaaagctaatggcgtgtggcccagcgcacccgaggtgtctgcgctgtgcctctcctgttcctgtttcctgttcccctgtgtcttccactttctttcccagttcctcagatctgttgttgtgctctctggcatcccctgaagcctttctcagccttccaggtggtgttcgggactaaggaagctgctgacttgaccaggtcttacttgctgttgctagtgtagcagtttattagcttgtcccaagaccggtctgtatcaggagtccacagattgtggcccgctctggcccactacctgtttttgtaaataaggttttactggaacatcaccactcccatctgtgtgtgtggctgctttgggggctacagtggcaggattgagcaatcgtgatagagactgtttgccccaaatgcctgaactatttcctatctggcccttgacaaaaagcgtgcctgcccacatctgcacggacagtggcccgtgcgtcgcctgtagggaataacacacgcctcccggacagccaaatgaaaatgcacacagtggctctcacagagatcagacgcgcagtaaatgtggagaagtctgcagaggtctcttgcagatttgtaggtgatagaactttatatgtgtgaatttaagaaagccggttttgaccattagggtaacattgttacataaatgtgctttttcttaaatatttgagagactgtgtagcagagtgtgtcatgcttggactctaagctacactccaggatgcctgggctcagaccttagtcctccagttgtgagccacgtgaccatgggacatttgttgttattcacagccccgtgccttaggctcctcgtcttcagcatgaggattataataatgtgtacctcctaggcttgatctggggattaagtgagttaacacaaagaacttggaactgagcttagcacatagtaaatgttaagtgtttgcttttattgcagttattaatccaatcctacctctgctggaaatccttgagaagctcctccttatggacaggataaatctcaaacttagaagcctggtacacaaggccctgccagacccagcctctcccctctatccccccgtcagccacacacagcgccccagtggctgtcccaagtcagtctgcccttgccattaagccggtgtccccagcctctcagccataagtgccctttcccctcttctgccacagtccccagccaacaatgaaacccccatcaagtggcaccaacaattttgatactttacatccattatatggtttaatcctgagaacacctcttcatgtggacagtgttaggattatctgttttacagagaagagaatgaaacaagaaaagatgcaagcaactcccctaaggtcctacaggcaggcagtgcagaggctcacccagctgcaggctctcccagcccctgaagccagctcctgagggttcagctccagaagtgctcattcagaggactctccaccaacccccaccaaggggaccctcaagccctcagcccccatcagactcactctcccttctctcttgcacttttcacattgcatgctttgttttgcttttatcctttttcttgttttcacccttgctgctttactgcacacacacacacatgcatacccatacgtgcacgtgcatgcacacacacacacatacccatgtagatgtgagcttctcgagtgcaagaactggattgtatttagctttacgtcacctgtgcctagaacagcttctggaatgtagtaagtgtatagttatgttacatggatggagaaaggcttccaaaaaatagtaaggactgattgggaaacactaatccatattccacacacacttgtctttcgcatttatgtaatttcaacattcagttatcaggaggcagcacattttattggtcaaatacatgggtccccgagccagtttgcttgagcttcagtactaatcttctagctcttgatttttctcatttgtaaatggagtcctggggtatctatatttcatgtggttattggaagaaatgaatgaattcattggtgcaaagcacttaaccaagtgcccagcacacactgtggttcagcagctgttatgattgaagtagtatcatgtgtacctttgatttacttgaatctatctacacacaatcaaaaggtgtgaaaggaaagggaaaacaactgccatccctcacccccgcctccggccctgcccgccgtcccccacccccgcctccgaccctgccctccatccctcaccccccgcctccggccctgcccgccagccctcacctccgcctccgaccctgcccgccttccctcacctccgcctccgaccctgacctccgtcccccacccccgcctccggccctgccctccagccctcacccccgcctccgaccctgcccgccttccctcacccccgcctccggccctgccctccggccctcaccccagcctccgaccctgccctccgtcccccacccccgcctccggccctgccctccgtccctcacccccgcctccggccctgttctccgtcccccaccccagcctccggccctgccctccgtcccccacccccgcctccgaccctgccctccgtcccccacccccgcctccggccctgcccgccagccctcacccccttctccgaccctgccctccgtccctcacctccgcctccgaccctgcccgcccgccctcaccctcgcctttgaccctgcccgccagctctcctgctgccgtgtgccgtgcttgtgctgggacagttttccgagatgtggcagccagcacaaaccagctgctcgatctggtactcaagcaaaaaaagaaagaaagaaagaaaaatattattcccaacttagaggaaaactggggctcatgtcaggttcccgcgtgacaccttcctgtggggttttaaaggatgattttgaccatatgtgcatgtcgtcttacacgttgtctttttgagccctttcacatgactgttgaaggtagcagtgatctagtggtgtgatctcaagagtggtgctcaccattttggttaaaatataagaatatgtggtgttgaatggattgaggcagcactcggtgtcccttgcctattcatagggtttgttttttgtttttttgtttgtttctttttatgaccagcctgaatttctcttcatcagtgcagtggtcctctggggctgtctgtatttgagtcactctctgagggcctgggagtgtgcagagagagcatgtttgagactggcagctgcaccagcagcaacaggaagggcctataacggtcatgactaatactccgtgctgatcgcattgttggacaaaaagtatttccagtgaatgttgtcacaagtttaaataaaaggctttactttgtgtttgctttttgtttaggtaactactccagacccccagcgtatagtggggtgcccagtgcaagctacagcggcccagggcccggtatgggtatcagtgccaacaaccagatgcatggacaagggccaagccagccatgtggtgctgtgcccctgggacgaatgccatcagctgggatgcagaacagaccatttcctggaaatatgagcagcatgacccccagttctcctggcatgtctcagcagggagggccaggaatggggccgccaatgccaactgtgaaccgtaaggcacaggaggcagccgcagcagtgatgcaggctgctgcgaactcagcacaaagcaggtacgccacccaggagcacgccccgggcaggtacgctgtgtgtctacccgtgaccacgtgactgcgcacatagctgcattgttccctggggtcacacagagcagtagaatgtcactgtgcttggccgttctttttgtgttaaatatattctgtagcatcgaggtcagagaactaagtgacaaaccatgttttatgatacatgaggaaggaatgtgagcggtgagcacatcagtcgtgggaggtgatttgaaatgcctgtgaatagtcattgcagcagcaaaccagatctggttgcacagggaagtgtctgcgtggtaccaattgaagcagtgacttttaagcaggaaatacgcttaggaacgatttaaaatctaaaacattcaaaaggaacacactccccacctttttttcaccctaccacaagaatcttcctaaaatacaaacttcgtatgtatacatacgtgtattgtgtgtttgtctaaatgtatatgtgtgagatttatatacttgacattcttatgttatattttatttttccaggcatatctatctgtccaaaccaaaatgtggtttaaaaagcaaatataatattttagaaagtttgagttgataaaaggctttagctacaattacttactcatttttaatcccgacttaaaaattaattttgaagtaaatacttgacctggataaaaataacataattaaaaatttataaggcaaaggtgaatatgttttaaaagcacatgtaaatatgttttaaagcaacatactttgaaagatgtgtatcttaatgatatcttcagaagcaaagtagaagattccgatttttgtcaaagggaagcaaaagctaaggtgtgtgtgcgtgtgtgcatgtgtgtgcgtgtgtttttaaatgtgtcttttgttacttttcctctgaagctgctatctggggaatgtgggacccctccagtcttattgttttttccaaataataataaatttcccttgaggaaataaaatgaaaatcaatcattatctttctttctgtctccacattacaattacttaaaatcttctgaactccagcagtctagccctctgccgaacctacacaggctttagggaatatttttgtaaacctgtctgtgaaaactggtttggctgttgaaattgaagttctaattcaagtttaaatgaattgtccattgttgcaactcataaagcgcaagttattttctttttttaagtagaaagtatttgattgcatttggcacgcagcctttggagggacctcagaagatagccacagagagccaggcctgattttgtgtggttacaaagctacgcgtgccccctctctgagtcagtgtttatgtcatcctgtagcaatcaatatataaatacacatccatgcattgccattttccgtttctaatgcgtagaccattccaaagccttgccttcaacttactgcccattttagctcaccaggagtttaaatgggggctgtatatcttcttgtttgcttttaccaaagtcaaagctatactttaaaatggtaaatggagattagaattgagaatattacttttctctgcctgtccccaccctttcgttggaggcattttctgtaccccccacccctcaggcagcggcaggatgcagggtattcaacttgcctccatggtctgtaagccccgcacctatgtgtgggggtgacagatatacagggctcatgcttgtgcatcagaacaaatcccaagaagctgttcttctgttccactttaggccaccatacattaggtcgcctgcttatcccagccagtctggggctggcggacgccccatgttttcttcccagcaccccaactatggcaactctcaggctcccatggtgcaccagcctgaccagtacgggtaggtagcaacacaccccgacttgctgcgggacctgggcgttttctctgaaactgttaacgatcgtgccgtctggccgcgaaaggaacacccaaaccaagaaagcgaaacacctaacagaaaatccatctccaagggggttgtccttctgtccatttttgttggtgtgtttgtttcgttttcctttcgtattaacagtactgtggccgttcggtggaaacccgcatgcgtcctcaggccctgtctgtgcatggctttcggcatggctgctttccttcatgcctgagagggaaatagaaactttgatctgtgtcgaagacatgatgtcaccacctctggcgtcatttcccccattgttgtcattgttttgtctaggaacctgtgttgtgcagcgctgttctcatgactatattatcactcctgctgctacagtgagcggctgccatacccacccccaaattaagagcacagcatctcatttgacaagagactcactgcagttgagctgacaggctattcataggacttaggaggagtttcattatatcaccaccaagcaaatgtctgtgccaaaaacttctattattttttctccagcgagtatcagaatattgaagtcaccaggaaaatacaacaaaataatccaacagataattttctgtctaaacacagtgttgccatattattctcaatttcaacacaggaattacatacagcaacaaaaagtatctcttctttcctactacaaaactgtgtaatatcaggttctgtcaccatgtttaggttagtaaatgctcttaaagtctattactattgagtgaattgctaaaaaaaataattattgctatcatcctgggcagacttaatcatgtttggtagttagttttagtagagacatgccccatctttggttaaaatcaaacagggaactatcacctagctttgtttaaacagtaaacttatagaactatgctttcactactggttatgaatgcctgacagagctttttagtagttttatattcagtttacatttatttagacagaacaaatgataattttggaatcgagagttctaaagtctgtaaacatggccctaaatgtggaccaacaaatatagaatcctgtaaacatcatccccaaagtgaaataacaaatatagaatgaggtaaacatggttattcttgggaaattggcttttcctctttcttactttcttgtggtaccttcaaggtcaattcatgagtcagtaggaagataacagtcggaggaagcaagcattcatcatctgcagctaatccataggatctgtccttttaccaactccagaggcctctttagacccacaaagctagtttgactgtgccttgccaaaccacattaagcagctgtgtaaaatgaatttaaatggcatgcatcagagtgaaatctcttccactggggcagaaaatcgatgttagctaaccagcacgaggagatcaaatctgtatttcagccagcagcatccagatagcttccttagagtacaacacctcctccttaattaaaaataagaaaaagaaaaatgttggcgttattctatgtaaatcttataaagcacacttggcaagggctcatattcatagccccatgactgttagctgtgaattttaacttttatgtctacactattctttctaaaaaaagaaagaagttaagttttatttctattttaaatcttccttctgttcacttcgcaatgcacataacctgtgttgtgccttttttaaaagcagaagcttgaatctgagaaaacatgtgtatgacatgttttagtgctctgggttgagaaatctgattttcaacatgcttttgctttacttatttaacagcttgttgcagcaaactcgtggttttgctttgatttttgttcccccattgatggctctgttaggttgaagttaggttggcgattagaaaagctagtttgctaaatgttagtttctctttgggagaggaagaaatggcatagtgtgggattcacagagcttgtcagaatgacttctttctcaaggcacaatcccaaaggacctagagcccatggaagaatctgaaaaggacaaattaatgatgaaggtggagcgtgagtgagtgtgtgtctgcaattagataaaaacagaatgctcattgtaaaaatgaaggattggggcaattatgcttcagattttctcagctggtcaagtataagatagtagagagaaaaaacatgcaagtttaactggttagaaactgttttattaatttctttgagagtgacaatatgaaggtaaaatcgacctgctgcattgaataaattaagaaacatagattaattttttttctttttcaccttttgagtaaattcctcattttgatcatcagaggatttacaatagaatctggtgaatcttcttgttcacgtactagattcactgtgcagtaatatccagtcatttgaagttaatggtttataagtaatatctgtacagaaccctcctccttctacacactgataccctttttatctgaaaatgcattgttgtgtacagttttaaagcattgctagttaaggaatttacttttgaagatataagaaacagagagttggaaatactagctgatcttactaaaagcctacttcaggaatggcaaattagttccatccatctgtagatcagttctcgtggctctctgtagcatcattttggaggattctgagccattacctgagcataggtgagccaaagtttgccagaagcttaggaagaactttggcctaccacttcctaaagagcatagctgtggatcccaggctaaacacaggctttaatatagctcactacaacctcaaattcctgggctcaagcaattctcccacctcagcctcccaagtagttggtactacaggcacgtgccaccatacctggctgattttatctttacttttttgtagagacagagtctcactatgttgcccaggctggtcatgaactcctagcctcaagcaatcctctcttctcagcctcccaaagtgctgggattacaggcgtgagccaccactcctgaccttgtaacattttttaaatgactgaatccattatgtttaaaggctgtgcgtgcagatgtgcacaggtagaataactttcccccattcattccatgtgtcttacgtccttttattagtcctagatggtacctggtgatgtccagcaattgacagctcttcaaaatacaactgattgtggatttggaaatttcagcattatccagaattttttcttggaaatgagctctaggaggaagcatgatttcactgaatttacagaagatctcacaagccctggatctttaagccagggtagatggacaaacagattttaattccttaaggcctgctaccctagcacctcacatatataaattttgatcaagtcttgagtgacttgagattgtgtcaaaattctggcagggatctttaagctaatactgtgttcataagaagaggttccataaggacacagagtttcaattatagaatgagcagatctcagaactgggaaggttttagacgttacccagcctctatttcttgattttatggtggagtcaacaaagacctacagggtcacccactcagaatcattgagtcaggagcagggtccttgtcatctggtcctgttgttgttctgctcttctgtttttttttttgttttttttttttttttttgagttggagtctcactctgtcgccaggctggagtgcagttgcacaatatcggctcactgcaacctccgcctcctggttcaagtgattctcctgcctcagcctcccgagtagctgggactacaggcacctgccaccatgcctggctaatttttgtatttttttttagtagagacgggctttcaccaatttggccaggatggccttgatctcttaacgtcgtgatccacccgcctcggcctcccaaagtgctgggattacaggcatgagctactgcgcccggcctgttgctcttctttctacttttttgttttgttttgttttgttttgttacacaacacctcttcatttttgttctccatcatatctagtggcaatcctgctcctagaaaccaaatagtaacgagtatcttcgtggatcttccacctcttgcattgaaatctggattttttttctcttatctgaatttcgttacctctgctgcacctaaaaggaaatacatgctttgcacattcccatgtagactccacgtgcagctcagagttagattgtttccagagccaagcgctttgtgagataagtaacagttacttactggcacaagggcgggtttgagtttctgtccttttcaccatttgaggcttttaccaacactgctttggcatttaacattgttgggactggagtatggctgttaaagtacgaattgtgaattgtgaattgtgggggagcagagtgggaaggtagtgatattgacacggataaaggtgcacacctacatgatgctggtataagcactactgttcctttgctgtccctgagagagcccttcgtggactaactgagcatcagaagaaggagaagtctcagacttcttaatttcaaaaaaaaaaaaagggtaaaatgaattaatttgaaaagtcttgttactcttgactagaagggaagttttaatactgaatatcacaaatataattctgtagacctgcattttaatactacatcataccaaaaactagggtcactgaaattagctttcaaatgttttgtgttgagtccattaggaaattgggaactttagttaagattattaaatcttagccactcattaacagggtgaataaattccatagggtagctagatcagtggtaaccccaccgtattgctgttggaggagctgaatattttgggagagaatgtgactagctgccttcctctgcttggaagaagctgggtctatttacaaatgcaaatgaattggactggcttgttgggtatacagtggcttgtactgtggctcatgtgcaccccacatagacacatcttccagccactgttctttattgaggtgtatctataattcatatcctgtgttgccatttgccagcaaggcactttttctgtgttattttcctctgaagccagtatgatgcaattctgctgatggacgaagagctgctgatgtggaaatacgttaatggagatagtgcattaaaatgtcaaagagaaggggcaaaaaacttcgaaatgtgtcaagccccagttgtagtggggtccatgtgctaaagagcaggaagtgatttgtattaaccaagaatccagccctttggattttggacaattaggttttaacataatagctatgatttgaaaagtcatgttattgaaagacaaagagaaaagatttcaaagccttaaacagattttttatttctgcaattaaatgtaagcctttgcattatcatctaaatactacgctttaatttttagccccttttttctcttcaaaatttagaatttgaatgaatgttattatgttagtatttaaagattatgatttcaattaaaacttttagaattacagaactattatggaagccataaagtgcatttataaatcatcaaatcaaaaagtagtaaaacactaattctaaaaggatcagagatttattttttaatgttaatgagagccaaggaatcacagcatgaactgtgcagcagacctgggagggaccggagaccatgaggtgccccaagccactcgtgagcgtcacccagagattttcgacagccgctgtacaccctcacccagccagggggccaaggcgcgggagcctcaactccaaaatcccctggtggttctggtgtggaagccagctcaggtctgaggggggcctcagagataaccgccactgcagagcacggaggcagcatggagtgggaggtttgggaggcatgctccggacgcttcctccttatgcagtcttcctgagggacatcacgtgaggagcacacagggctcgcactgggagcactctggcatcagaagctcgagtctgcgccgacctgaccctgactcaggctctggagatctgttgatcatggcagagtgtgtcttcctaaatgctttgtcttgatttctgcccttttgcttcctctcagacctcagtatcctcctcatcccctgaaatactcagttccccaccacacctagcctgccctcttcattcggatattcccctctccgggtctgggtctggccctctcacagctggtggctgtgctcactcggagatggctcaccgtgactcgcgcaccactgtctatgccacctgtcttcacttccagcttcatggctctgttaacatcccgcccccatagatacacacttacaccagatgtcctgggatcgtcacagcgagaaccagcattaaagcgcacccatcactaggcgtcattagcagcccagcccagcaacccccacggttctgagttacgaaaggcagggatctttggaattacgtgtgtgcaacaggagtggcaatggccagtgatgccaacctgccaggtgtcaggctgatgaccagcaggtggtgaatttttcaccgccctgaaatctgataacctcaacagtgttttgggctgaaggcagcaggaagtttgtaagtggtgaagaggctatgactatgtcttagtatattgcagcttggggtttggaaagtgtcgtgggtcacagggcatcttagtagcagtaaggagtatgagaagcaactcactaagatgctaagattcctcttaatcttggtcttcattcttattttgaactccatttctgccattatatagatttaaaaaaccaaacaggccgggcacagtggctcacgcccgtaatcccagtactttgggctgccaaggtaggagaattgcttgaggccaggagttcacaagcagcctgggcaacgtagtgagccagtctttacagaaagtgaaaaacagtgagctaggcatggtagcgcacacctctagttccaggtactcaggaggctgaggtgggaggatcacttgagcccagaagttcaaggttgtggtgagcgaggatcgtgccagtgcactctggcctggagtaaaacagtaagaccctgtctcttaaaaaataataataataacaaaaaatgcacagacagaaacctgtaagattgtggcccttgttttaaaagtgaactcatactggattacttttgattgttaaaattcctgccaggtaagaacctgtctgaatcctgtcctgcacagagtggctggtgaggacataaagaactatagctttgctcagcttgcaagccttgcctaaattttaaccctaactgaacaatgtttggctttaccaaactaagtcactttgtggcccaggccaccgttaactcaggaaatctccaagaatttttaggaggattttttaaagatcagaaattactgtttttctgtttcctggacaagtgcattttttattagaggtttctacacaatattgctgcaacacagtgatataggatggagaactcaggacccagattaattttcttaagcccactgacaagcccattaaggcatgagagttagatagaacgcatgtaagatagatgtgtgcttccccctcgcactgctaaaactcaggttcgtccatcagggattgttacctactctgagtattgctgggctgataagctctctgtgtctgaggctgtgtggctccagacctctaagagacctgctccctccactctgcttctgtggctcctcggcagctaagccactttgggattagcagttcactcccctttataccttgtgaccttggaagggatgtcctggaataaaggatgtggctattcctagcactgagaagtaatagccctccttggaaataacagagatcttttcttaatggtactatgatctcaagataaactttttaagtaaagatccttaagtagaatgcaatagaggtgacactttctctctgtgggtgacatccatggcagctaatgtttctttcatgctgtatggatctagcttcaccagaccaggaaactgtgccatttacatcttctcagaggtcagtgggatgcgacatgataccaaacccccaaagttctggagagtcatccattgcagggaaaagacaggatttaggacccactgctacccccctgtggctctaatccacactgtgcgcttgaggcagcccatgtgctggggatcagcagggaaaagctgaaatcagaatctctgaactaaataccttcacagtattgaggttcatttttgtatggttgccaggaaagagtccgtagtagcagaacaatgggcttaacaaaccaaaatcaactttgaggatgaagagaacttccttagttatcagttgctaaaattcaagcaaccagacaacaccatgtttgcattttcttcacaccccgacaaggaggcctctcgcctcagaacccctgagctctatttgttctcctggttgctttgagagaaaaggtgaagatcagtgagctgctttaggaacaactaaagctggttacctgcattgaagcaaaaaggaagagctgaatcttgaaattgcacaacaggtgccatttcagcagggagtgccaggagcagagctggtaacaggtcggaaccttctgagaagtctgtgtgaagtatgaacaaaagggaaaaacgtttctgatgttagaggcttttaagaaatccagactggaatatgcagtattcctcagtgcttagcaagaagagcttcaccaagatgcaggagtgaaaaatacagctctttggagaaatgtggagacaatcaggagaaatgctttgaaaacaagaggccctgtgggcagtgccacattttaaaggaccaggcaaagacgtgccagggagaagttctattctgaagagctaaggcatagccactgaaaatattattcttgagagtatggtgacaaagttactactgttcctttacttagaagttctctttcataaagctgtcgcaaaacaatattcttctttgcccattcttaaaggaagaaaataaaatgtaaacatatcagctaccaaaggttttggggagttattaacagggagctggaagataactggtagctgctccagcttgtctgctagcactgaatacatggaagctttctttgagtgagcaggctgcctcgaaaacaggtcacattcgccagtggaggaagacttagacaagactcacaaagtcttatatagagggttcctgcatagggaggaaagatgaccccaaacctctgcttcctgacctgagagtccacctgcctgtgtgacgctaggtgctcagaggcctgtccaaagccaaaccctgtccacatgtccaaaactaagcccacgctttcccctgatgttctttatttcagtgactgctccattatctgcccatcccacaagctggacacctaggagacagctaggcacaacttttcttttccccagaggacctaattcatcaccaaatcctgtccgtttcacctccacgatattgctcaactctctcttgtgctccaccacctgttccagggcaccatcatttcttccttggttgtggtaacagcctcgtaacggtcagccccacattcgttcttcttgcctccgatgtgttcttcccagcatggccagagaacaatgtctttaaaataaacatattttaatgccattgctcctgcttaaaaaccccaagtgtcttcctgtttctcttaggataaagaccaaacccagagaaccataagcctggccccgcaccactctcgcttcttattttgctctaccgcattttctcctggagagggcctcctggatgccccagggcccttgaatttgctgtttctcttttctcttctccttacctggttaattccagtggattgatccctcagatctgagagatggaggggacgtcatcccttccttgggaccttttcctgtgctcgccttcctgtgagctcacataacacacagacctctccaagccacgcatgtggtcgcaacttcgcactcgctgccctggttgtttgactttggttgtgtttgtttttagtcttggcccgctgttgtgctcattcctctcccatacttatcttaaaatactcatcttggacaagtgattataactgtcaacaaagcagtaggtatttctggttaattgtaattacttatagcatgtctccctgagcaaaaggggtagaatctattttttttagtagcatatggttatatacttttacacgaatctacatttttaaataaaggcacttctattctatgtcttttgtctaatgagacaaatgccactttaccgccacaggattgattcctagccagagccactggcttgttgaaattacattattttgccaccagaattgctaatgcagctgttgttgcaggcacgctggtggattagccacaccaaaaattgaccagggcttgacggtcttattttctgttttgattgtgtgtgtgtatatatatatatatatatatattttggcgggggggcacatagtagttttccctcttaaaatattaaatttaaaataacctcgactgagtctctccttctcagtactgctttggaagagtcaccatgtaattcgggttgaaaatctgtttcaccagtgatgctagatacatgtgtgagaagagtttgtgtttataaaacattttttatagggcatcctgtgtaatgttaatgtatgcaattggatctctccagaggaataaagtaacacatttagaaataaactgctggaattggagcatttcaaggttttgagtactggttctgatgactcttgggtttaagtgataaagtgccccaagttttagtgttagcctagtttatgttgttagtaagcagtcttttctggcttcataacccagctacatctacagtgacagtccgtatagagaaagttatgtacacctggcactcgcactcattttcccaataaagtgtgcactgcgtgatgctcattccgaacataactcaagggtggtatttgcagtggatgtgctggagcttcccccgtgtctgccactgggatgggactttaaagtggcttcactcacagggtctccatttcttctgtctgtccctacccttctccaaagaactgtatcagaaacccattcattttaaagataaccacacacttcaccgtctgtcactgttgagaaaatacagtgttgattgctaagatgataaggcctaaatattcttctctaaagcatcaaaattattttaaattttaatgtagttgactttaaaaccagatatttagaaagatgtgggtactgcatgaaatttcatactaatatttttaactgctgaaagcaaactgtagtgggaagtgatattcctctttctgttttcacactgaaccattggaaatagtcgcttgaaaactggtgtttgctttgggcttttttccccaaagacagccctttgttgggatatgaatatgtaatgtttgagaaatctccaaagtgaataaaaggaaaaagtaaaaaagttgttggggtatgtatgtgtgcagcccgtgggcaggaatgaggagtgctgtagggaaaactcacaggtcctgctttctcaattattctccctgtaataacctggctttgcttatagaatgacagttcttaaatacctctggtcccaaccagatttaaataaagttcttctggttattccgcaggtcagcatgtttaagtaataactccccaatttgaacattgccatttaagaggaggagggagcggtgctgtggtctaaccctggcccaggcgagcgcagtgtcggcatcctggggtctggggtcaacaccacccaaccagggtcacccccacagtgtgcatctaccgaattattgtaaatgtttgtctccttacccccctgagatgttcctaggcagtcatttctacagccatggactcggcatctgcagagtcaggacagctgtcctttgtaacagacatgaagcccgcaggccccctggaagccagagcccaagggtctggggggaggctttgcttttccgggtacagcttaggtttctgtagggtttcacattggaaacattctgctcgtttcaattcatgtttttgcctgtttttgttttgttgcttttcaaaaaagcaactgatttacttcttaacactcctaattcatttggagccgtccaaatgttgtgttggtcagaaggggctcagcagccagggagcgctgctctggaaaggacccagctgctgctgaggtcgcctcgaaacccaggtcgctgtggtctcgggcattgtattttcagccccaccaaacaaggagctttttgttgtgagccacagactcctcctaggttagcaacaccacgctgagcaggagtgctgggttagttagggcggcagccatcttaggagtccatccacagcccgctgtctccactaaccaaaatcagtggcgtgcagtgcgagccttcttttggtatcaggcccatgttgcttgttcaaaattaccaagactcttggcagtagtgtctcaagcaagagcaaataggatttcctctgcaatggtgaaagactggctctccccacccagacaggcacccactgctctgccctggccacgtgtggcctgtgctcctgggaggactcacttcctgccctggaggcccagtaggcctgcagcaggtgtccagggagctgttgtattcatgtctcccactacccctcactgtggccagctccctgaagcctgtattccaggactcccggagagtttacaccctctggtttgtcatctttgtacaaccgcagggccatacaccagacagatggaaaggcatggtgcagcaggctgccaggagccaggcacttggtctcactgagtgttagcagtgttagagtcccatagagaaagaagtgtagtataccgcactgatagtaggtttggggaattctatttctgctacttactagctgtgtgactttaggcaagttacttaacctttctgatctttattgcctttattaatatatgagcataattccacctaccttcctccaggaatctaaaacattaaatgtgtatgcctagaatgtgcaccaggcatgcagtaaatactaaataaattactgtcactatcattaccagcccctccctgttctggtgtaaaaaactgaaatccaaaggaccagagctcccagagctccagtgacagagtcaagacccctggctttttaaccaaacttttaaaactacagatgtgctttaattaaggaccattgtaaccagcaactgacatccaaggcatggacctcattgttagtttaaaggtatttcttaaaacctgtagtgtgtgccttcatcatcttctggtgattaaagatggacacggatggacagtgctgtcctgggggagaaatcctagatgagggttggatgattacttcattcagtcatttgcctggtggattttctattctgattctcttttttaccttagtataaacaagtgtctcaaggaaccattagtttcatacatgttagttacactatatatgagacggaatttaatggaagcttgaaaaggcgaccatctttgtaatgccttttttcaagaataaaaatgttctgtagtaattcatccctttaacaattttttttcttttttttagtaattctcatgtgcaagggattaattaggcccagatcctcctctcaggaggcttccatacctagaagaaccaagacatgcgtaaattattttaacatacaaaagaaagaggtcagtgctacaaaaggcatagatgaagctaagtggagaggcagggcttactttcaggaaggatgacaaggacagccatcacagagcagtggccactaaaatgcatcttggagaatgggccaaaattggctgtgacttggaggcagtcactgacatggaagtagccttccagaaaacataaccgtccacaagtgaagatgctcttcagtgattgtctgctaagacactgagagcagtcccatcaggcgccacttttgaagcagttacctaaatgctcaattgtcccttgtttgaagaacacctcagaagggatacttctaaggtacttgagttaatgccaacactctgcaagatgatgtaaagccctgaaccatatagggatgtgtttatagctactgtgcaattgtgtgcatgagtatgtgatgacctagaggttaatcagaagctgttggatgatctcagatctgttcttaatgaactccaaggggtattctaattctgatttagcagtctgcagttattcaaagtggactgtcaggaagctaagaattgcaggctaaagtaatgcccatttctccctgagccaccctcatacctaagaatctttcagcttctaacagtgttctttccaagccatcatggtacattagattgtacagaatttctctagtttgtctaatatttaaagtagaccagttatggctttgatagcttgattttgcagatggtccacgtttgaactttttgtacagaggtttttcagttgagtccgctgaaaataggtaaacaaaaggaacagtatatttaaaaaaaaaaatgatttatggaccagacatggtggctcacacctgtaatcccagcactttgggtgggcatatcgctttgagcttaggagttcgagactggcctgggcaacatggcaaaaccccgtctctacaaaaatacaaaaattagctggatgctgttggctcacacctgtagttccagctatttgggagagtgaggcgggagagtcgcttgagcctgggaaagcagaggttgcagtgagccaagactgcgccactgcacttcagcctgggcgacagaatgagaccctgtctcaaaaaaacataaaaataaaaaaataagatttatgttaatcttttaaaggatctcattttaaaatgccaactattataccaagtgatagcttaatggtggtggagggggttgtaattaatttggaacagataggcagggtgtctttggatttgtacccctctactagcttgtactcctaagatgaaacatgagtagccaaaactttgaaaaattttttaaaggtatgctctttacgtaagaagagcttgactacaatggtggactcttttgacgcttttgccaccttgctatcatttctgtttttagggcaatctctacaccactgtgcagttaaaatctctcccccatctcgttactaacagtcagagaattgacattgtgtgacagttatctgcttcaaatcagagaatactcttgacctctttgcaagagtgaagagaagtctgacagggcgtaagacaaaactaacaagactaagtcaccaagaccgccttgtaggtctgcaccaccctggggacgggcgactgcatgctagggacacgtgcagctgatctaagtgcccatcctcctctgtaacgtaaaaagcccaaccaacaagaagtggaagtctgatgtctactgtggcattttaatgtagggaaattggtatgtttttaatagaacctaattaccaaagttaaagagtagggtcggggagagttttggaagtgctttctcccatattcattatatcagaaaatttaggtcaaagaagtttttttaaaaaacattcccacactgcccatttgtttttcatttcttaacctttgggtttttatgtgaggttactaagtagtgttaatagtcagaagttaattttgcttgcttttgtaattcctgttcttatttcaagttccccctttcttgcttatattcctctatataaataataacctggaacacttgacatgattaaaaatgtgtaatttacttgcagaacttgtaatatttggaattgtaaaggggtgtattaaagagttacctagcaatagaattcagcctttctctccaggaaataatctgttttacacaaacatgaaaagttatagccccaccccttacataaatgcattagtagaaatgactgccagggcaaaccactgctaatgtgcatggtcggtatatgtgtgctgtgctttctcttcctgtaggcaaggcagtttccccggcatgaaccagagtggacttatggcttccagctctccctacagccagcccatgaacaacagctctagcctgatgaacacgcaggcgccgccctacagcatggcgcccgccatggtgaacagctcggcaggtaaccttggcagctctgcgctcctgagcccctctctctcccctctcctcctcttaggctccaccagtgaatctgcctaaacggcccgagaaggtggatcagttggcgaaagtgggaatcatactacttttctgcttctcagaaacttgctccatctatttaagacttgagaattacattatattttatgtaaattatttttattcaatctgtgtttgtataacaagtggacatatttcaagtattattggagattgttaaatatgcacactaagttctctttctctttgggaattattagtattggaagatcctcaaattctctccatttggtagtggtggagacaaacatttcgaattcacatttcaggggaaatcgctggaagggcagagcaaggggggtttgaagtactttttacatttagggaaacacctctaaatgtatgctcggaagtagctgcttcataaatgctctgtgcagattgtctctattgggaaactgttttaaatgtttcatgatgtttagttattttaacccattttataatctccacagtagcgttcttaaaagtcatgcctgatgattgcagtggatgagtagccaatgtgtggaaaatatcaagagtgtctgagactgtgcatatctcccatgatcttagactcttcaagacccttgaaccccctcctcaggttccgtaactacctaaagacaatgagtaccactttttacataaagtgatgtgtatttccagcgacctgttactctctgtcacatgttaaaatggatctcacgggaggattccctccttcagagactgcagggcgtggcttagccagtgtgtatcccgtgatgccccgtgatgcgttaggaatgcatgggacagccagatccttggttctttctgattacattttttcatttcttctgccttccacctcctttctggcctctctgtctttgaaagttcatgtccctgtgtccggcggaacagccagtgagaggctgggctcgcctcctgtctgagcttctgcgtcgttgatttctaggacctaattgaagggtgacattccatgataatttctcttgaaagatttatgaaagaggaacacatagaaactagtggtaaaaatgaaggtttttaaataaataaaatagcccttcctgatgctgcgttgagtgcttctccatcacagtttggtggatgttttacattcgagatgaaagtgaaaagcttgcaaacagcctgttagctggaagcctcttctttccctaatttccctaaccagtgctggcccaggtaacagaatattgggttgtgacatactatgttttgtctgacttgctggaataaaattacttgagagcattgaaaccacacaatcagttttcacctaatatcagcagcgctcattttccccgtcttcctttggaccccagagccacagaaacaaccaacaacaagcagatggcccagtgccctgcctcagaagatttatgtattcctaaggaatagccagcttaatggagattcacagagagggtttctttctattcttattattcagataattcagctattcgttattccgtacagaggaaatctgttcagtgaaaggccgtccatcctcacgatcttttgtatggggtggtagtgtatttttttactgcattgtacattttgaaacattgaatttttaataatttaaacatttatccagttttcctctacacgttgatctgattttatcccaccttgattaagtgaaatgcataacagaggaggactggccatttcacattggctgtgcacctagcagcaggtacacgtgaatctgctgttactgcgttctgatctctcagagagacaggagtgacgcagagcgttacagcacagcccctgtgagcgttgggatgcgtctacctgactgcacaagagaagggccagaaatggtgggatcaccatcactccagtctccttggtttgggcccatggagataaattaccagtgataacagcaaagcatttctccatcaaaatatacttttggagaaagcgaggacagcacaaatgatggccaggtctggtggtggaattttctgaacctcagcagccagtgcaaccagcattccagcaattctcttcaccgagttcaaacaactgtgttgtagacagtgtacggggccaaaaaaaaatcctcctgtgtagtgacaaattgttacaggcttcagtgagcaagtaattatttaaatggagtcagtgtgagtataaatgtgacaactatttcttcacttaaaatgccaagggaaggaggatggtaagcagtgggaatttttccttctaaagagcttttttggttttgttttgtttcaattatttagattaaaaggttagaattatgtattactgtggacaaaattacaaatcactgtaatacaatacatgtgtgattggttaggttttacttatttgtgttgaattttataatattcattagtcatttgcacttgtctgcatataaaccgtcatcttaaagtggacatctaaattccaaaaactttatctcccatctgtggttctaagtttgcctcaccagacgctactctacaaaatgtagggcatttctcctactgccacctataaatagcacaggagcggccatatgtgctgctggaaccaggctttctcacagagagccctgggcacattccagaagtgagtccttctgctaacctagcaccactcagtcccaaacatgaagtgtcccgttaatgccctgccagtacagggtatcccagctccagcaggcctttacgaagaaaaaggcaatcacactaccacaaaaactgagaacctcctacctctggacttcctgcagtgcttgttaaaactaccgattctggggctcccttcagaattcttgaggtgggtccaggaatccgcatccctgaccacttccgcaggtagttttcatgcatgcaagctcaagtttgagaagcgccaatgtggaggtattttgctcaacagtctcctggcagatctgctgccagctttgtggggcattagctgtttaccagatgatttgctgttttgaaattgaaaaaaagaaaagattcacaaaactactcctagaatatcaatcttccagctggatcactgttttctgtcttgggacttcagggtctctcacaaaggaaggtttgggtcttcagcctcattgcgaggggctggttgtccgggttgtttgtagaggttgctggggtgctcactttcatgcttgctctaaggtaatgatttcaagtgaattgctgccctcccaccatatacaaaggacttgataaaagggttttgataagttatgaaaaccaaatctcttaaactgggggaaaatagatcctgagattatgccaaagtatgtggatggctccagactctgtaggtggctgggggagctggtttccttggaaagccacccagcatggccagtgtcctgggggtggccacagtggggagggggcgctgatggcaatgatggggtatgcagggcctccagggtactcgctggccccactctgtgccatggagggtcctcccggtcagggctgtcagggccttgcgtatccaatgagagcagtgcgtctcccgagccgttcttagatcctgtgtgtgttaccttcacagtggactttctgtcttggcacatgtaaacatagtcatgaacatccgcggatgtacatagatcagccctctgtgttttcaaaaacaagaaatcaaatattttgcagtctggtatattaccatgaaatgaaaagaactgtgcatttctgacctatttcaccatcttctggaaatgattttgcagacttgtaaggagactgagtaaaggaagaggaagaaagcaggcatgagtgttgaagttcggtttgactcatgtcatgtgttctttacgttccttttgaatatattaaatccagtgtggaatagctgccttaggaccttgacccacacttactttaagaaatcgttctagttcttaaatttcaatggtaaagccagaggctggtgcttgaaaagtatttacagtgctcaggcagcactttctgcagttacagattctttactgcccctttttatgtctgaactttacatactggattactcgtgtcaataggagaaggaacagtgccttgatttaacacgtccttgtaatagtcgtggtccttctcttctgggaaaggagaagaaatagtgcccctggagtcccattgccttgggaggcatatggctcgtttcagtgattccttgagaattctggtaagaagtcaaaaataagcatttaaataaaaagaatagtaaaaaccacagtaaggaaagagcttctgatccatttagtaaaataaaacatacattttataaggtagaaatattaaatagaaccatttattactctaaattctatccttatttatctctcaaaataatagaacagtgccacttttgataatttttctatttgcacacccaaaatgcctgttttaaaatatataatagagaatgaagaaatttggggaatttcagaccaacaatgtgtttatattcatgtaagtctgattttcaaatcagtgtaaattgtcagtaatttccataatacatattggcctagttctgtatgcttacaagttgcgtttgtgtacgctagcacatttaatgcgtaaaatagaatcttactattcctgccttcaaaataatattcatacataatttattgtaaatactgacaaaactaccacttaaaaccattggagaagctcgatgccacagaagccatgtgcccatgactttaccactttctctggaattgttttggctgtcattcctttgaacccgctctgaatcaactagccaggacatgtggactcgcatacataagcccctcttttcgcactcatcctgctcttttatccttctattcttctgaaaagggtgttttttaatgtacaggtttactaattcatatctcgttagaccccagagacaaaactgcgtggaagcagtccagtccactgctttgaacaaggcggtcttcgcggtgtaatatctctcagctgcttgaggtttcacacattcacaaaaataacagcatttttagctgatcccaatagatttttctctgcagctgcatcacttgaaaaagctttttgttccagttcttaaagtctaagtattgaaagtaatttgaaaaaaagaaaaacatcccaattatgatttgtgtgtgttgtgatgacttcaaggactgactgggctgcaaatgggctttgaaaaacaagccaatgcgcccgtggaaaagacgggatttcaaagtgtattgttgagtgtgctgatgtaaactcatgggcacgtggcagggcaggcttttttggcaggacctgtggtctcaacctgcagtgatgctaacgatattagcaaattagcaccacaaagcttgccagctaattcaccagagcctgctcactctctcactgctgtaattaaaactaattattttctaaaacatagtaatacatgaatatgtgcaataatcattttgtagtgggcaatctgcggagccttttttaaagctttttttttttttcttggcacataacgctacatgtgtcccgccttggttgagccagcactttcatttgcagaatgtagaatgggccctgttcatcaaacctcaggtttattttcatttgaaataggcctggtttctggttcttcccactcatgtataaggctcatcattctctcccgtctctctccttccctctcttcctcactctgactcttcacatctggttggtgcctcactcgcagcccctgcagcccagtgttgcgcagatggttttcacagtggggttctgtagaaattcagctgttattccctggatagctacactgattccttactctagtcttgttcttccactaaaaagaaatctaaacccatatttttaacctgaaaatgtctgctgtatctgcaatgaatgtggagaaatcagttgttctatggtgaacctttgatgctaaagcctaaatagaattgattggatttctgagcctagtgctagaaaatgtggtgttgactctggagctgctgtgggcctctgacctgggcattgagctgctgtaagggttgatgaccacaggctctcagacagactgaaaggatcccagcacaactgcaaagtaatcagaaatcctttccttccaaaatttatttttaattatattgtttttgaagccatctgctgtgattgtcttcccttattgttgactagactacgtgcaatagataaggttttcaaaagaaacactgtgaaatgtcaaataattttgcaaactatagattatttgcacttatgaaattgagaaggcactaaatcctctaggacctaggtagaaaatacgcacacccagtatttgcctccaactcctgattagtaatttaaacatttgccttatttccacttgttgcctactcttttgaaggtataataattttgaaaaaataatattgatataagttgaccttcataggtttgggtcttaagcacacagaatgactgcccttttttttagataaaaaaggattttgccagaatgcggtgctgtttgcatttcagaaattaatatgctccccattacaatttcttttttcttttcttccttcaagggaaatgcaagggcctcctgcttcactctgtaacttgtgttggcaggagtacagtctgacgaatcacacatataatcctaaactctttctcctgttttcgattagcatctgtgggtcttgcagatatgatgtctcctggtgaatccaaactgcccctgcctctcaaagcagacggcaaagaagaaggcactccacagcccgagagcaagtcaaaggtacttccttcgcctctgcacgcggtgtgaggtctgcctagcaaaaagctgccatgtcgttctctcttcactggtgttggccgacacttttttttcatttggtctcctctgcatgccttcattttgtgcaacatgtttgtagtcttcttttctttccccagccccttcatggtgtggatctgaaagttactagttcttatggcattaactcacggttgggggagaggggtggagggacaagacccacctaagaaaaatgcttcggggtggggagaagtaggggtcctgcctggtttcggtacttgcagccattttctctgccttcagtttatagcttcctgttttggccgcctcagcaacaacaacatacttaatattttgctttcctgccttatttgataaataaggtgaacagctttttttttttctttctttcataaggggtaacccatgcttagcattccatgtaagcttgaagtaagcatggtggcgtactggccttctccagcatccagcagacttacccaattatactaattaagaatgttgttttaatacctttatctatgtgtggttttgtgtgtttgtttgtacatgtctttatatatatatatatatatataatatatataaaaaaattagtttgttaaagtggatgtactttttgttattttaaataaagtttgccctacctttgtcattttttttttttttattcctctaccacaggatagctacagctctcagggtatttctcagcccccaaccccaggcaacctgccagtcccttccccaatgtcccccagctctgctagcatctcctcatttcatggagatgaaagtgatagcattagcagcccaggctggccaaagactccatcaagccctgtaagtggctctggtttttttttgttttttttgttttttgtttttttggggttttttgataattaattaattctacttgaatgcttgcttgtttatttgttttgtaagactttttcttcattatttatccatgaaagggttttctttataaataataatattagtgacaaaatgaataaagtttgcgtgcatcaaagaagttgatttctggtaatgaaaaagctgttataaagaagcacctctatacaaagcatgcgagtgtgttaactgggtccaaactccttcacacagtgactttttaaaaatgtctgatccattatgcacttatagaagattcttcaaatgcgttacttctccatttatatgggaactaatagcagccattgactgaatgataagtttggcccctgacctgtattttgcatgttctatctatttcaaaactgcctacctgaaagaagtaaatactcaatttgggtatggtttagtgtaacatcagccctgctttatttttaacccatttgtctgaaattaataaaaacgtacaagttgttagtatgtgaatgaatttttagtttaataatgtgtacctatgttagaatcagttgagatagaacaattgtattctgcacaagactgctgataatcttgaaattaagtgttgatttttgtatgatatataaattataacaaaaatgtcacggatgtatcagggaattttgtaagcctcaatgttcttctgaccctagaagtgggcctttagtttcctactaaagaaattctgtaccattagagagaaaaaaaaaatggtgctgaagcaacctttattttacattcatataaagaatcaaaagatcttaaaaaaaaaaaaacaacatgcaattacttgccaagaaggcttaattaacatgctcatttctgtaaggcgatgtattgacgagcacggctcaggaaggcaagttggaggcaagaagaccctagctgtgcagaatctggcaatctagtcaaaaccccaaaaggaggctgctattaattatccattcactggtttaaacagatagagcctgaaggcttgaagagttggttgttctagtaaatgtttgtaaaattcacatgcagctctaggataaccagcattttccctttcagaggaggaaagggcgatattcgctcttaccttctctgtagctacgtttcgattttgcagcacccgtgatgaaagagaaagcgcttctaggatgggtatagcagacagtgcgcttctaggaggggtgcatccgaactcgcaggaaggggcgcaactcctgcattttgatgtctttgtgttatttgctttgagtctcagaaggcagccgacattgtgtttttccctcatagtctgccctggttttttgttttgttttctttttttaataggaaaagcattcctgaatcagtaatgctctcaagttaacaggtagaattcagataacttctcaaaagtatttgtgtgttggcccagagggagaatttcagaggttaaaaataataatctttaaaacttaagataataattaagggccgggtgcggtggctcacgcctataatcccagcactttgggaggacgaggcgagtggatcacctgagctcaggagttcaagaccagcctggccaacatggtgaaaccttgtctctactaaaaatacaaaaatgagccaggcatggtgatgggtgcctgtaatcccagctactcgggaggctgaggcaggaaaatcacttgaacccgagaggcggaggttgcagtgagccgagatcgcgccactgcactccagcctgggcgacagagtgagactccatttcaaaaaaaagataataagaatgagcacttattaaaaagaaagactaacaatagaccatattatattgtttaaaacttttcatcttgctaatttcattgacttataaagaaggcttgagatagtcacaatattttaattcactagttaagattatctccatccactgtaggagactttatcaaaatctgactttctcctttaatgtaagacaatagcaaactgaattataaactttgttttctgattataattaaacttgaaattgtgtattttttctcaatatttccatatatatgatctcttcctgtaccataaatagttttaagaatttgcaagcaaacttctggctcctgtagtagataggaacaagagaagctgaagttcacagtagtggaaaatgtcagattattgctctgtgttgagaaaacagccacttttttgaatgagatgctaattcaaaaaggggagcaaaagagagtataatgaagaacctaacattatctctgctatcaaatcactgcaaatacatgcaaccccggaatagttaactgctctttctgagatgccgcttcaatttgggcttaaaattgctcttaatagtgtccttaataaagcctgtctaacagcaggtctggaaaaggcaaaatgatgaagatgctctatgctttgacagtgtactgtggaccaacattgttttgttacagaacattctaaaataaaaataaacatttgtccatacacatacacatacacatattaccaggcatatggtaaagactgctgaaatgtaaatctgcctaaaagacttgaggaaaatgtacttataggcttaattaaagtatatgcaaggaaaacatttgtggcaccataataatgtcttgctgtaattttacagcaatttccattcctttttcttgcctccacaaagtttcacagcagtaggatacaatttttgcaacactgaggcggtactaggtaggccttagtgactgggaaaagtgaacccgtctttccgaagggcgagtttgtttgcctactgtcagtgggaggagtgtaaatgaagacctttatccaaagccagcgtctatgaacaaggacagtatgtttggagcctggtcagtgatgagagtgataacgtacatgctctctattcactaagtctttaattgcgctctgttcagacactaaatattggctgtggtcattgcctgcccagtatgcgaaccataagctggggtggaggcgttgagtgctggcagcggacgcaacctcttgctcagccttcagtcttactagactgtgcccacgttcactccacaccttgctcggtgaaatcctgtttataggatatttgaatcagctgttaattcctgttagcatgttccaagcgtttcacaccctttttgtccattggagtaatcactcatggaaaaaaaaaatgctatcacagccctccagcatgcagagcaccacgctaagtgttggtgatcagcatccacccaaactctgacttgtgaaacttaggatctagtcggaaaagtgggtgtcagacaaatagttacgtgcaaaacatacagttttacacagtgtgtgacgtcgtgctgcaaaggaaaagtaaagcgtgtggcagtggtgaaactgaggccctggttcagctaagtgagccagcctcgggaggcctcttccgaatttatcacgtaaactgaggcctgaccgtgtcagttccctgcagatgcagtttcctacattatggtgccataaaaatgcctcttagaagatctaaaaattatgaaaaagaactattctcttagaaagtatcttcatttaatttttccagtgttatgacaacaaattgagataggcacaagttaattaaacttaagtttatttaaccaaggagagaaaagttaatatatagtcaaactgtgtccatcattatctcaggcctattccagcttgtaagaatccagtcccttcagaagcaagaacaagcatttctgtgccccgttgctctgttcatgattctattcatccagaaccactccccagtttcagtttagagaggaccaaaccaggaacggcagatggatcttacaaacaggatattggttgagctaattggagcaattttaaattgaaatgattgcctttatttgtcttatctttaaactgaatctcaaacttttacctcagttttttacaaataaaatgcaagagggaagttgttttactgttaactgattatagattataatgcctttttcttcatgttcttatttcaatttttcacttttgaaaacgttggacccatttttttaagtgtaactccccaaagaagaaaaaaactctatactaaaatttagaaacctcctaataataactgtcccgttaataaaaaagaaaactccatactaaaatttaggaacctgtttttaataactgtcccattaatgacggcagagcttctgaggtgctgcccggatgagagtcttgtgtaaagtgtgttagagcagcctcttttcctagtcaagtaggccttgggtacaaggatatgaaaaataagctttaaaaatttatttggatatatagtttctatattctaagtgtacatatgggtttatagacatatatatattcacacatatatgaatatgtatacatatatattttttaagctcttatctaaagtggtttttaagtgatgtgaagtttaacctcagcatcaaagtatattctaaaatataaaacaactattttttatcattctacattttttatttacatcaactgtatcacccattacatatttgataaagaggttatgcctcagtaattctgaagctgaaggcttaaaatctcagcccagtgactctggagaatcacgtgttagttaaagggaaagcggcggcctcacatgctgcgtaagtttcattctcaggcatcctttctgagggacctacttttactggagatcattctgctaaataaggtaacatctagcctcaatggcagtcatgttagttaaccccctaaaccttcaaaaatatgtttaaaattatgttaagctaaataaagaaaaaaggaaaaaaaacttaagaattctgtctgtaataatttctctatattgcaaataataacctaggtatgcataaataaagtaaattattgttccaagaaatctttattgagaactgagaaaagattttgtacaataaccctagtattgcaaatattgtaaatatttttacaaatacagagatataaataagaaagggaagagatacagttggcccgcctagggctaaaagtgttacctgtccagattatgtaatccacggagtaggcttcaggtgttcagaaacggcaactcttgatattttagtgtcaggtaaaagcaggtacatagaaacccaagaactagagtatcaatataaaacacatgagcatataaatacatgggcataaaaataaatgtatatgtttatccataaatcccaaagctttggttgacccttagtttatctaaaaaaaaaaaacaaaaaaaaacaaaaaacacacgagcttatagcccacaccactggttcccgtgactggaaatctaccttatatttttcagcaagcaccgtgtggttgctcatcctccagatgctgtagcattttaacgaagacaccctttagccattcttgttttgacaaggaaaagtaggagtccatttaatgttttgggctctataatatcacatgtaaaaattttaattcactatgatcattccatgagctagaacccttttatttttaaaaataacatgaggtgtcactggaattttgccttctgggattcaacgcttatatccaaaaagggctttgttcttttttgtttttgtttttaagtgtataaaagggggagtttgggccttttatttaaagtaaaagtaaattcctaactaagaaaatgtatagtttgtgcctgaactagtagccttcattcctaattgttgtgtgatagcagtagtttttaatctcttctcttcttgtatttgttagctcattacttttttctcaccttcttccctctccctctgcccacccatgccccacctccacatgctgcttctgggtactagaagtccagctcctccaccactactggggagaagatcacgaaggtgtacgagctggggaatgagccagagagaaagctctgggtcgaccgatacctcaccttcatggaagagagaggctctcctgtctcaagtctgcctgccgtgggcaagaagcccctggacctgttccgactctacgtctgcgtcaaagagatcgggggtttggcccaggtaagaatgagtgagggagggggtgaaaaaggaagcattgtggataagttcttacagtggctttctttgaatgtgtggactcattttttttctcacaaaggaaaagctaagcctgtgtgaaagtcgccttcttgcaacccacgtctgtgtgctgtcagggagcactgggggaccctggctctgccaccaactcgcagcgtgacctcagcaggtcatgttcttggacctcagtttcgtcatgtatacagcgggccagactagattttcctgtaggttttcttacagctccagaattctctggaatctgccagtagttcatagtaaatactcagaaatgttttacaaatgactgaattaattatctgtgtcagatataagtcacatttactgcttccctctatccagaacaggttagcaggaaaattaagtgatacttgtcaaaccatgcccacaataactggacagttaggagggccattgctgtgacctccagcgggctaggcctgaggtgtgacaggggagctgcctggggtgcagatttaaggagctatccactgtgtgcttgcttgactctcagagtgagtgcgtcctgaagtctcataccccaggcaccggctttcctcactgtagccctcgctccttaatcaggagtctagttgtaggaccacgccctgtcataggaacagggaaaaggtactcactgtgtaacctttgtctttctaaatacatgagtcaccagccccaaagcatagatgagaaaactcctgtgtaacaaaatcaagtacaggatggggtgcagtggcttacacctgtaatcccagcactttgggaagccaaggcaggaggatcacttgaggccaggagttgcagactagcctggggaccccagtaagactttgtctccattaaaaactacaaaacttagccgggcgtggtgatgcacacctacagtcccagctgttcaggaggctgaggtgggaggatcacttgagcccaggagttcaaggttacagtaagctttgatcacactactatactccagcctggttgacagagcaagaccctgtctcaataaaaaataatatattttttaaaaaatagaataatgctgtagcccagggacactcacagggtagttggtggggccaggtctgtctgactccagacacatactcttcccatttgccactggttctggagtccagctatgcattagaatggcctgggcagcttttcaaagctgtcagtacctgggctaccacccgacatcaatgaaatgaaaccttctgtgcccaaggtaatctaacaggcagtcagaatcaggcgccctgcgccccaccaaggtggcgggggtcactaactatccaagggcaagtcatctgccctgcaggtgtcactgacggcctaccgtggtctcagtgctgcgtctcgggggagaaaggggaggccttctttgtgcttagccttcccactaggtgcctaatccattccatgggggaactgagacctgtgacagaaagaattagagcttgcccatgacgctgcataaccagctgctaagtcgtgtgataccacgtgtgagtgatggtcagcaaagagaatgattgagacacgcctctctctgacctggactccctgacctttcccctctgcacctgggctcctttgccttctgcccctggactcccctgacctttctcccctgcacctagcctcttctgacatggattttttagaatcaccaagactgctcaaacgattagattttatcagccagcacagagtagatagtgtctggctacttccttactgtgactgtgtccacagtatatataaccaggctgggtctgtcatgagactctccgcgggcttataatgagggttgctggaatgtagctgggttgcatctttgtccccaccccatcatgctgtgtaccttgtgggcatcagatgtggttgggagcaggtgctgccaccacacaaagctcagctcccagccttccttcttaggtcacactgagcagcgcccagcttgccatttctgaagtaacctgaagacccacagtttgcagccctgcattcagtgccaaaagagggcggtgggcatctccgggagcatccacaatttattatacaccaccgagtactaagtaaatggacagaagagccgtgtgagaaagtttgaacccagaaatttaatatttcattaaaaaccactgtccccttacctcctcccttgccacacaacgcaggagacatcaaaaggcaaaaccttccccaagttatttgcaaatcctcatgtttcatccatgtgtttaaccgtttaacctttcataacctgttcccaagtgggaatcaaaaggttaaaataatgcctcggatcttgacgtcacatttcaggagttctctttctttctcctccttttgcgactgtgttgtctccagccctttaagcctccttgagtaagagcaccgcacaggaaggtgtgcacctgccccgtcagcagggctggtggccagtggcatcgcatcatgctttttaagttgggggccgttggtccaggggctcatttgcctttgcacgaggtgctgcttttgcttttgcctgacaccccaagcagtcttggggtgaggggatgggtacggcccagaatcacaggcccacttctgagggcttgcagctgctggaatgagcactttcacatcagtgcccaaaaacctaacttggaaaatagtgccgttgttgctttttaaatgttttgagatgccctttttccttaattggaggtgcagtgggatgagcgtgaggcgttgggagatgtggcgggcagaaggacctccgagcagtgctttttctgttgccatcagcaggttccctaatggttttataactgtaaatgctgcctatgcactgctgagtgggagtaatgagcattagttaaaagaggcaaatgaagaaaagtcaaccaagacattaagtgctttttttgtctcctggctttaaacaagccactttgttgcaaaccaatgatcctgccgtgtttttcactaggttaataaaaacaagaagtggcgtgagctggcaaccaacctaaacgttggcacctcaagcagtgcagcgagctccctgaaaaagcagtatattcagtacctgtttgcctttgagtgcaagatcgaacgtggggaggagcccccgccggaagtcttcagcaccggggacaccaaaaagcagcccaagctccagccgccatctcctggtaagtggcggcgctgcagtcactggcccaggaaagcccaggcgcctggcctgggaggttccgggaaggtggtttcacagtcaggccaacagggaacttgggacttttgagaggtggggggttcctgtgtcgttttgtttatttaattggacgcccactggcagtgttaagggatgagagaattaaatctgggatatggccatttctggttgacacttggaaggcaccccttcttttgctttaccttaatcaaaacaggctttcgaattctaagccatatacgtttattgcttatacaagtattcaaaaagattccatctacctctacacaaaataaagatcccccagtggccagtttgaatacatgtgcacttctaggaaatgccaccctacaggttcgacagctcgagctcccccgccctctttcggaaatcctcagatttgaactttagtaaaatgaagcctgggcttcgtttctaatgtcccctacccagcaagttctcacttctagggaatttaacaagctgtcgtggtaaggatccacacggccttgttttggaaacaggtggtcttttgcagccttgttctggaagtcaggggtcttaggaatgggtgcagcgctggccaccaacacgctcgcaggccgagccacatcagtgacgcctgctggctcccttccctctcctccccactgacagagaccctcccattcctttcagctcccctgccagccttcgttctaccgtttggctttcagatttgaaatgacaaaatcatatattctgataaatgcaatagtagagaggggaagaaattggcaccttagtgctgggtggtgaccttactccagtagatccgaccattctcttatctgtgtctgcctcgcagtcagcgaccttcagcacattagcctcactgttcctggtccctgtctatgagatgtggctgcacccaccgctcctgtacacagcttgttctgagcgtggctggcagcccatgtttcctgagcacttccagtgtgctgggcccttttctaagtgctatcatttcattttcacatcagccctgtgacattgatactattttaaaatccatgagaaaatgaaggtctcgtggaatctaagtacttgcccaaagccaactagctggggagtagaaggtcttatctggggcatctggtgctacagtatacacgatacccaccagacacctctggctgtattgaaaatacctttgtaatatgtgaaatgtttacacatagaagccagagaaagaggtcatttcatttttaatgatttcctctagctgctgtctggatggcaaagctgatatccaaggttgctaatcaagggatctcacataaatacgttttaggcccaaagtgcacttgtagtgaatatacctagaattacatctgtaggctctaaaaacaagtagaaatcctcgctaacctcatccttaaagattcaaaggctttaccaactcaggtgtcccttaaaaactgggaaatctaattttaaaaatctcacaacattacatccagttcacagagtaaaacaagctgcctgtgaacagctctgaaactatttttccaaaataaaaacccagtggggcgtagggaccaaagtggtgatgtctgtaaagatctaagggtacattttatttgccaggaaagaactcgtgtcactgaatgggctgcacttgtgtatggagaatagctctcccagtgtgcatcagcttcaggacgggggccctgctgaggcgtatagatccttcagaaagtggagggcctgttctcttaacagccagccgttcccttttccccttttttaaactgtcatttttatggcaacattatcattttaactacacaaaagagcttggattgcaaatggactcctggtatacattcttctcagtagtccagatggagccgagggcctgtgacacaggaggcagtggaaggaaagcctcctggtctcgtccagccccgagagcgcgtgcagggggctccaggcacacacaggcgtctgggggtcgcaggcagaggcaccctggtcttcagaagcctctcgattcactgccacccacacagcaggtggcctctccgattccagtcccatcattagggaaagtgtctggaaacatttttgttgttaaaggaaaataaaattattcccaactattggccatgttagagtctcatttattacaagatttttaaacacaaatttacggtaaaaatgtatgttctttgaagtcactttttcctggaagaacataattatagtttattttttaccagcacattcaggcgaactaaactaaaagattctgaagaaacattttagattttttttcacccaatggttgctctgaaccagctaaaatcctaagtcttttgactgtattctaagagcactctaagtcatctgtctctagtcaggtttcaatttggggtgctaatacagctctaggcttcaattctgtcagcctctgggaggcataagccccttggcccctggggctgcaccccacatatcactgccaagtggctgtgtggcttctcacaccggatgtctgggttcctgtcttccagccaccagagcaagtcagtgattgagactcccaggtgaaccaaggcaaggccatggggtgtggtttgtgtctttaaggtgccagtggcgatcttgttataaagcatctagaaaaggttgtgggggagttccaatgagcgctgtaggaagcacctccccagcctgtaagctggagatggggaggggaatggaagggaccaggctgggagaagtggggcaggggtggggcatggagctccacattcggttaataagtctgtaaccaaaaacccatccatcttggctggcaggtggctgactgaatttctattattagctgacaggtgatgtcacaaaacctgtcatggatccaactagggaatcctcagtggaagataaatgagaaagggactcaggttataaacagaggtgccctctggttgacctctagtcactgtagacctgggacatatcagctattccttctccccaccctacttcgctcaaccccgccagaactagggcaccaggttcgtgccgggtaaattatcttcccagctaggagcctggccatgctgtctgaagtgtgtgaatgtacttaaccttcagtaacctttccattgtttactttagagtatacatttgtagcttctggcaaaaggtagggatgtcctagagagcctgccagcctcctctattaatggagttacaagaggttgcattcattttttttttttccatgaaaggaaaggaaaaaaaaaacactggcaagggagatttttcctttttttttttattagctataaatgtgaatacttgtaaataagggtctttctgaaatcaagccttgcaagtgatgtttccaaggaggctgtcggctggagcggagcctgcctgaatttcgaaagcaagtcatttctcttctgcagcactaggcgggcaaccatgtctgcaggattattacccttttatatctgcaaaagacggctttcttcctttactccaatatacctttttaacatgtgtttccagggttttacgcaaatttggtttgtaagtatgagtgaatacatttttcttttaaaatacctacaataagtgtcaatcttctctgtataacaaacccccatgacatgcgtttacctatgtaacaaacctgcacatcctgcacatgtacccctcaacttaaagtttaaaaaaaaaaaagtaaataaaaacttttttaaaaaagtcagtctttgtggcatctctgagaacttctctaagtcattcagtgcagggctcacagggacggatgttacgcagtgttcagctctgttggccagcgttcattccaacccaggccagaggctgggcagacctcatctggctaggaatgtctctgtctagctgaggctttccgagtagaaataatgtactcattttgatttctgactccttcccagtgtcctctgtaacctctcgtggtttgtttcacctccattgccactagagtaaaatgtgaataatggtagttgtagtgagccttgggaacgtcataggaaaggcattctacacaataacatggaaaacgttattcacaagcagcagtaatcctgccatttgttcggggggttctgcacgtttttatcagaaactccatgagggcaggggttgttgtctttcttatcagtttggtccactggtgtatgtgagcatagaagagaacctagactatagtaggtgtattactcatttattaagtatttgtttaattcacacatgaaaccagtatctattgatgatctggcgtgctaaggactgcagtagatgacagagcaggagccctgcaaatgttacgtttttccctcaaggtgaggttaattaatttttccaagagtcccacataaggtttggaaaaaatcagttcaattctgttattataatgtaattatacttaaaagccaaatctcagcaccctgataacagcattaaaaaaacgccaaaccagtatgacttgtgctttttgataacaaatctgatttcataggtcaaaaagtgacactattaatgacagcacagacacattcagatgttgagaagctattgaaatgacataaggctcattgttaatttgtgtccttgcttttcatcttaaacatttcacattgtctaagacccagaactaagttttctaatttcgtttctaaaacagcacaataattcatcgagttgatgcacaaaaattttcatcccatttataaaaatgtacatttagattatttccagtctagacaacagtgaatgaacactcttctgcctaaagcctcctttttattagattattttcttgggataaataccccagaaaataagtatccagtcaaaagatataaatgtgttttatggctcacaaatgaaatatgttgccaaatagtttactcaaaaacttctttactaatttttactgtaaacaatagaaaagcaacgaattttacaacatcattatcagcaatggctattgttactgtttctaataagatggtgtcttatttacatttatgtctttcatctgtataactagcaaggcagctgggcttacttgataatctctggatttcttcctgtttctcttggtgctgctactatcagctaactcgggatccttgcaaggcccacagaccccccagtcaactggcagcaattccatggcagaggttccaggtgacctgaagccacctaccccagcctccacccctcacggccagatgactccaatgcaaggtggaaggtatgttcaaataactctgtgaggcatacaaagtcacatttgttcatcttttagttttctggggcaaacttcacagagagaagaaatggtattccctagagagtttttaaatgttgatgactgccagttttcttcatgtcatttatcttgaatggtttttgcatttgcacatttcaagatgggttcatcttctgaatgtactgtttggaggtaactcctgctgtatcattaagctttcattctttgcctctcttcagaagcagtacaatcagtgtgcacgacccattctcagatgtgagtgattcatccttcccgaaacggaactccatgactccaaacgccccctaccagcagggcatgagcatgcccgatgtgatgggcaggatgccctatgagcccaacaaggacccctttgggggaatgagaaaaggtacgtgtagaggggcctccacccggccatggaccagtgggcattctactctctgccgttccacaacagttcacctttcactcagaacacctctgagcccatgctgcatcggtgtgggtcccaggtccccatcctactccacttgtggccttgggaaaagcagttagcctctttgtgccctcatcctgtccccggctggcctcagtgccctcagcctgttccctggcacatgctccctgtttccggatacctgccacctccttacacgtgccaagttacgttcctcatctagaaattgggaaaataataggacccgcttccaaaggcatggcgaggattaagttcctgcaacagagctcagagaagagtggctggcagccgcggtaagtaagcacgcacttcacggcacttggcatggtggtgtgctagtgtgcgctgggcgctagctcgtggattggtaaatcagagtcgctgcccaccttcagggaatcacagactccctgccttcttacttcctgggaggaagcaaaaaataagttaagcacaaataagcagttaaagattgtggttggtggaagacaggaaagtgaaaggaagaaaggatacagatagcagtggcactgggtggcgcggtgggagagagggaaagcgatttagactgagtggtcgggagggaagggccctgaggacctgttcatgggggtggtggtgggaatgagcttggtgtatgaggaggtggtgggtgtccagagcacagtgagcatgggcccggggacaggctgaggtcgttgaggccggcggggccaaagcctttcggtgtctgtgggcgtattgatgaatctggatttttccccaaggtgaaagatgttatgcagggaagtgatgtgagtagtttttttttgtgataaataaataaatgactggccatctctggagaatgtactggaaagaggtaagagtagctttggggagaccactgtgagagtctagggggagctggccaactggagccggacaccagcagcacagagggaacccgccggcagagtgtatgtcagaggtgctggtggagtgaacgcgggccctgagggagaagctaaccgtgactgggcgggtgaagacattattccctgcaatgcagaggattggaaaaggaccgggctagagaggggaacctggagtccctctggggtgtgtcccggtggtaaggcatggagtgcatggctggagctgagcagatgttgggatcggtatgatcttggagtagtaagtgtagaaatggcatctgcagtgatgggattgatgagatccttgagacagagagtgcagaagtttatgactgccatcaggagacaccaggctggcccttcccttgatgcctgccgactcccaaggttgaggtggcactgaggctgtgactgtctgagccactgtccttcagttctgcccgtggtctacaagccacaagtggagacttgatattttgctcttgcgcattcttccaagtgcattcaaggcctgtgaaattgaagcatgatgtgtatattattggaaaaaaacatatagaataaatagtgaataatatttttatggaaatacttactctggaatcccttaaataatagtacctgtgttggggtacataaatttcttgataatattgtctgagtggagagaagcataaagcccaaagccttggttttcatatgtattatagaccaatgaaaaagaacaatggagagtctttaaaatttgagtatagggcatataccatttaaaaatgaaattcatagtatttcatgtacaacatttcaggtaacactcataaagcaagatcatctatgatttttttctttcaaaagtttcagggctgcttattccaagtgaggattttgtaggacatgcagtaaatccataagcttagaatttcaaaagctttgtgaatgttggggtagctgtttttcttagtggtatgagatgctagacagaacatttcgttagtgcttttggtggctttagactctgaaaatatgacaacatggaaaaaaataattagtagtatttagaatttggcctcaaaatgtattgcaaaccattcccatatcccaccgatacaccacattagacaactataggtgtatttccctcgtgtcctcatgcctagaatttcttattacaaaaataaatttgtgggggtggaatgattctgggatcaccttgctaggccctaggtagatatatgcagatacttctcaccttacagtggggttacatcagaagaaacccatcctaaattgaaaatattggtaagttgaaaacacactttcacttacgatatttttgattgacaatgagttgatccggacataaccccatcttaaattgaggagcatactgaatgcctgtcgctttcacaccatcataaggttgagccatcctactttggtgactgtctgtaatgttgttttcatcaaccatgtaaatgatccccggtggcaagtacaatccctagtgtatttcagttcacctgctgccttacggtattgatgtattcagtaccaaattaaagcagataaacagaaaatccacgggaaacacattttctaagagtcttaatcctgttgtgtatagttttccattcttcagtttgccttactctgtcagtaaacttaatggtgctctgattttttatttaatgactaacttcagtggaaaacatactctttgtcgctgttgctgctgctggtggtgttaacctgtagtacaagtagcatggtcagagtctgatctaatattagccctcagtagccctgaggggcctggccctgcctgttcaccggcctgccttccctgccttcttacttccttacttcactgattgaggcattgattgattacatataaatgaacatcattttgtatgtttaacagaatagtatatatcgaatttatattattatctgtacacatagctctactttttttaattgaatagatacaccctaatgctctagtaatgggtgagttgttccataatcttttctattataaacaatgaagcagtgattgttgaagtacagttttttcacattgtaagaatgtttctgcgaaatagattcctagaagtagaattgttgaatcaaaggatatgaactttttttttagtttactgagtatctcagcttttacagtataacaaactacccccaaatcttagtggctttaaaaacagtaacacttaattatatctctcagttctgtggtagactgggtagttcttcgctctgtgtgtcatgttgtcagctaggatattgaggtggccgccatcatctgggagccaggctgagagctctgctgggctctgatgtctctcaagtggctgatgtcatccccaggctctactgggacctcaactggagctgttggctgcagcctcctccatggggcctttccatgtagtttcttaggtgcctataacatggcagatggatttcaagagggagcactccaagaggacaggtcccgggagcaagcagttaaaaacttttgcttgcatctcacttgctggagccctcttaggcaatgctaatcacatgaccaaacccaaaggcatcatgggaggggtttcccaggctgcgaatgctgggagatgcacttctttgggggttgccaaagcacagcctcccatagcaggtaaagcaggtattggcaaagcttataccagcttaatgttctcaacaaaagcatgtgagagtgtgcgggttctcacccccttactaagaatgatcattgtccatcattttaacattggccaatcagatggaagggggaaggcctcattactgtttaccttggattcattccattattagtgaactcacacatcttttcatatgttgattgaccatttgtttttcttttgtgaatgttcatttatgtgtttgcccatttttaatttgattgttgcttttcctgttgatttttttaaatttccttgtgtattagagaaaagctatttaattatgtcacgtgatttctttctatctctgttttcacatctacaaaatagaaagtaacttcaaaactggttctaccacaggttgatgtgagatcaaatagataaaacaggtgaaagcacattgcaaaggaaaatacttgatgctggcattggcccctctctaccagcctaacaaaatgtatctactcatgaaatcttaaccagcttttgcttcacataacataaaagtaactatcataggatggagaaaggtagcaatactgtataacgatgaaaatttatattaaaatgtttaatttgccttcaggctagtttctggactgaacacaatttccttcaggctctgagctgatgctaatttgcatgtactacctacttgtcactccatcctgtgttagaaatagttgtatttcatcccatcttgagctattcttaactccttaataatttttttaatccttattttggagtgaatcagtggctgaatgttaaggttttcaccttttttcttatgggagaagggaactaactttgtatacatattttatgtcctccttacaaccatttcatgagataatattactggcctcattttatagacaagaaaataggggccaggtgatgactcatgcctgtaattctagcacctcaagaggttgaggaaggcaggcagatcacttgagcccaggagttcgaggctacagtaagctacgatttcaccactgcagttgcaacattgcacctcttatcactaggtgatacagcgagaccctctctctaaaaaacataataaaaatgttgaaaagaaatgaaattaaactcagaggtaacttacccaagtaaggaatggatctgggcctgtattagttttctatgttgttatataacaagttaccacaaacttagcagcttaaaacaacataaatgtatgatcctccagtgtctgtggatcaggaatctggcacagtgtgactgggcctctgctcagggtcccacaggctaaaatcaaggtgtctgccagcactgtgagctctttgaaggctcagggtcctcgtccgagtttatttaagtcattggcagaattcacttgcttgtgtttgtgaggctgcagtcccgttttcttgttgactatcttctgcccaccttccctaacacgtgatccccctccacagcatgccagttgcttcttcaaggccagcaggaaaatatctctgacttgcttcctctctaagctctagatccaaacttaaagggctacctggacaatctcccttctgtttaaactcacaatcggctgattagtaactataatcacatctgttaagccccttttgccatgtaacatacataacataatcatgggagtgataccatcgtattcataggtcccacccacactgaaggggaggggctcatggaaggtgcccaccgggcagggggtgctggatcttcggggccatcttagatttctgcccccacagagcacatcttggctccacaacttatgctctttcaatagtattatggtctatcatattaagaaaaagtacaggccaggcgcagtggctcacgcctataatcccagcatgttgcaaggctgaggtggatggatcacctgaggtcaggagttcaagaccagcctgacctacatggtgaaaccctgtctctactaaaaatacaaaaattagccaggtgtggtggtggatgcctgtaatctcagctacttgggagggtgacgcaggagaatcgcctgaacccgggaggcagaggttgcagtgagccaagatcacaccactgcattagcctgggcgacagagtgagactccatctcaaaaaaaagaaaaagtccaaagacaatagagatgactagaagggatggatgggcctttgactttcagaaatgcctaaatgtatgcattttatttaaaatattgcagtgcctggaagcagcgagccctttatgacgcaaggacagatgcccaacagcagcatgcaggacatgtacaaccaaagtccctccggagcaatgtctaacctgggcatggggcagcgccagcagtttccctatggagccagttacgaccgaaggtgagtattttttaagatgacaatatgatgatttactagaaaccgtgctttcctcacacacacatttctgagccctggcagctgagccactgatgacaatatacagtgtcccctttcctgtgaaagtaaagaggcaatggctgctggtcaccaggtgagtgtcaggtggctgccctcagtagatggctattcaggaccagggagaaggaccttggccttggtaggagtcttcttcccgaagtcaagagccagggccgccacaagtcacgctggcacccggcaccagcacccagcttccttctgagggactgccagctgcacactccagacatggctcgcctggagctcctggatgcctgggcctccacagcacccgctcccctccctcccttctttctgtctgggggaaaggcctgtgcagtggtagccacactgggctttcagcattctggaaaggtcttccaggcagtgcttttcccctgtgaatattttaaacagagggacaatactttgctctttaataaacatctctagaaaacccacagcacaggcctcactgcagcctcgcttaaggaagtcatcttgaaatgactgaaaatggcaagttaaacttgcaagttaaaatggcaagttcagctgcaggactgatgatgcagagtgatttgtaactagataggaggaaaagttattgaaatggctctgaaaggtaacctgaaaactgcttcctaagatgatggcatagggtaggcttctttttgtgaagaaagtcccttgcctgggccctgacttcaatactcattgtcacaaaaaccccttccccttgttgggtatgttctctacctcctagtaagagacatgatgataagcaaggttttcatataatatttcagatttttaaagaaaaaagatagaggcataatagaagggcttttccctccccggagccacagtgtgtgccacagggtggagctgacttcgggatcgcggcttcggaagctgcgtgtgctgttctaccggggaccggctgggccagagccgctcacctttcatcagcccacatgctggggtcacagggatgggtcagtgggaaagcttcctcagtgtaatacaaaggagaaaaaggttgaaaaatcacggctttaccaaatgaggtttctttatggtattgtctgtgagccttgttcttgagagtccatcccatgtttaaggagacacggtgctttctcctagggacctaggaatttactcttctaattcttaacccggccataatacggccaatatttacttgtgatatattcgttaatcagttaaccataaggtaacatttagtgtgctgaatcaaggatttcagttaggtttgttttgtttctgagggtccaggaaaagctacagatgtttttttggggggggtagctggcaagattagaagaacaattatctgggctctatctaccacattaaagagaggtttacctcattgttaagttttctcttctgaaaaatgttgcttgttaggcaacttaaattttacccatgtcaattacatttctttcctcctatctctgcatttccttcttagatatcaaagtagttatcaaaagttcccgtgtctgtttcacatgtgatagtctaaaaattcagttatttgtttttattattctcattccttgatcagcttaggaatatattcagtccattgttccctttcttacaagatttagtatattaaaccaatgtatttttcaaagttccaaatctattgtcttttaaaacatgctattttttatggtatttataatttcttaatatactagtagttgaaaaatgaatgtattattcatttccattttaagatgtaataggtgtacatttgaatcatccctgttattcttttctggagccttttagggcataggactgtgaaattctgagcacttgtatttatataatgattagctaacatttgaattaaatttgaagtatagcttttaaaaattaaacattttccattcataatgagaatgtgcaaagtacaaacattttgatgttctggcacttgtaggaacattgcctttgagtcttaagttcttcttgctgtttcttgcttcccttaatgcctgtcatcacagcactgtacgacacttcctaaggtacacgtcagtggacaggcggggctgcggcctccaagcagaggccagaggctctaacaagtgcttacagggtgcctgcctgctcaaccggtattcctctgacacctattagccaacagcccaaactaggagcttggcaccattcccaaaatgggtgttcccatccctggtgctaacagttggcgtgcagctgcctctcagagggcctttgtcggaggggtgcgcagtaaaagccacacagagctgcttgagggagtcagggttccagaaatggattgtttatttctctgtttgcctgaagctttttctcagttaagttttctttgaatgcctcattccaggcatgaaccttatgggcagcagtatccaggccaaggccctccctcgggacagccgccgtatggagggcaccagcccggcctgtacccacagcagccggtgagttggcaagtgggcgtggggtgctgtgttttctggttctgtcctggaggctaaaactcaaacttgtcttacttctgaagattttcagacatctaacaaaaatgattagtgtttgttgagcattcaggatatagttaatgctagaaagtactcctgggatgttgaagtcagcaaattaaaaataactcttgatacacggtttcttgaaacacatatgacctgtaataagaagttgagtgtattcatccttgtaaataataacaagcccaagctagaattagtatattttaaacatgtatctattgtgcatactgttgtatcagaagccattttagaacagaaatttgtcaatgctttaaggagaatgtgtagaaaagcaacttaaaatattgtatactaatagtgaaagtgaattggcttatttaaaaatgagataagatgctaatgatacttattttgaataagtaggacaggtttttgctggttcacaggtgaccattgcagctcagagatgctaagttacgcaggatctcccccttacagtgaccagtgccgctgcaggaaccgcccttcgtggtgtggctttccagacatacaggactttgctgtttttaaaaaacttttcagatctgagaactcttgcaaaaaataaaaattttgaaaactatatatatgttatataattataataattatatataataatatgtatatcatttttcatttatttaattttgctggagcatataggcacaaggaattgctttttttctttttttgagatggagtctcgctctgtctggaatccagtggtgcaatctcggctcactgcaacctctgcctcctgggctcaagcgattctcctgcctcagcctcccaagcagctgggactacaggcacccgccaccatgcccagctaatttttgtatttttactataagagacggggtttcaccatgttggccaggctggtcttgaactcctgacctcaggtgatcctcctgcctcagcctcccaaagtgctgggattacaggcgtgagtcactgcgcctggccagtgaattgcattattaaaccaactgatcttaaacagttttcaagtaaagtggaaaacatcagcatctcactgcctcccatcagagtcccacctaccccgattaagcactggtcccggagcatcctgggaagcaagcttaataacaggtgtggtcccagccctgtcctcagtgctgggaccagtggggctttgggggagccacacctgaccaggccagaagtcagggcaggagccgtgggatggatgttgggtgacacgggccagtctggggagccgagtcctgttcgggggcttttctgtaaaatgaggcccaagaaacccttttaccccaagaccctttcaggccggcccctggatgctggctttcctgtgagagggtccttctgcctcctgctgtggtcctagtgcagctcccagcccgggagccgtctgcctgtgtgggagttgaacgctggctgtcccggtggcacagcctaaggagaggaggcttttttttttccacaggaagtttcaaacacgtgaaaacaaactttggatgctctctcctcagtgtgtgacatggtgtatataatactgaaatattgaacataaattgttagttctctgttgttataggagcttcccatattcattttgaaatgaacattctagcaggtaataactattttgcataatttcagtgtgtgattatacctgtaagagcacatcaggatgatttgtctttctgtgaattccagaattacaaacgccatatggacggcatgtacgggcccccagccaagcgccacgagggcgacatgtacaacatgcagtacagcagccagcagcaggagatgtacaaccagtatggaggctcctactcgggcccggaccgcaggcccatccagggccagtacccgtatccctacagcagggagaggatgcagggcccggggcagatccagacacacggaatcccgcctcagatgatgggcggcccgctgcagtcgtcctccagtgaggggcctcagcagaatatgtgggcagcacgcaatgatatgccttatccctaccagaacaggcagggccctggcggccctacacaggcgcccccttacccaggcatgaaccgcacagacgatatgatggtacccgatcagaggataaatcatgagagccagtggccttctcacgtcagccagcgtcagccttatatgtcgtcctcagcctccatgcagcccatcacacgcccaccacagccgtcctaccagacgccaccgtcactgccaaatcacatctccagggcgcccagcccagcgtccttccagcgctccctggagaaccgcatgtctccaagcaagtctccttttctgccgtctatgaagatgcagaaggtcatgcccacggtccccacatcccaggtcaccgggccaccaccccaaccacccccaatcagaagggagatcacctttcctcctggctcagtagaagcatcacaaccagtcttgaaacaaaggcgaaagattacctccaaagatatcggtaagaattccaaagctttcattctgaaatgaattccagttgcagtgtagaattttaattttagtaaagatgctgttcctgctcatcttaaagggatgaaaaaattatgactagaagttatcaagatgcgtttttatataggagtaatatagttggaggctgctaatctgaattaagaaatagtgccagaaagattggccgggcgcggtggctcatgcctgtaataccagcactttgggaggcccaggcgggtggatcacgaggtcacgagatcgagaccatcctggataacacggtgaaataaaatggtagttttacgtgtgaatgttatttgtgtgaaagattagagcttcaagtaagagatcagggaatcctgagtggttatatgctgtattttgggcttaaagatttgaacttaaccaagccacttaatcactacaatacgtgcctaacagacccccccatgaggctaatgaaatgctaaaggtgacctgagaaaatctgaaggcaagccactctgtaatttggtgacaacatacagtgaatttccgtgggaaaaagttaaagcttgtatgtaatatgtagattgatagatggtatgacataaagaatatgctatgctgtgatacatagaactgatatcatccaatgcactggtagacttgggccaagaaccatgtcaatcgaatgctgatgttgcttgtttatcctctgtgggatgttctgaatactaatcagaggtctggactatctggaagtacacacagggtttctgcattatttttgaagtacttttaacacaggaaggaagataatagatctgagttatattaggaaaaattactcaaaaaatatcaagaacaaattgacttaaaatctttttcagtgattagaaaattaaagatattaataatttgaaagacatcaatcactggacattaaggagatgtagattgagagaccagggcaggagaatcacttgaactcaggaattcgagaccacccttggacaacctagcaaaacctcgtctctactaaaaagaaaaaaaattagccaaaagtgagattcatttctgtagtcccagctattcaggaggctgaggtaggaggatcacttgagcccaggagatcaaggcttcagcagtgactgtgccactgtatacacacacacacacacacatattcctttatatatatctatccatttatatataatgcatgtgtatctatatccctttatatatatatatagatagatataaatatagatatatagatatatatagaatatgtgtgtgtgtgtatttatatggggtgcagagggnnnnnnnnnnnnnnnnnnnnnnnnnnnnnnnnnnnnnnnnnnnnnnnnnnnnnnnnnnnnnnnnnnnnnnnnnnnnnnnnnnnnnnnnnnnnnnnnnnnnnnnnnnnnnnnnnnnnnnnnnnnnnnnnnnnnnnnnnnnnnnnnnnnnnnnnnnnnnnnnnnnnnnnnnnnnnnnnnnnnnnnnnnnnnnnnnnnnnnnnnnnnnnnnnnnnnnnnnnnnnnnnnnnnnnnnnnnnnnnnnnnnnnnnnnnnnnnnnnnnnnnnnnnnnnnnnnnnnnnnnnnnnnnnnnnnnnnnnnnnnnnnnnnnnnnnnnnnnncagtatgtagctatcttagaaaattttaaaacagataaaataaaagtggaaaagccacggtgtctccccctcatgcaatgattcttggtgcctggagaatgcccccagcctccaggcagctccagggatctggccgagctgggtctcatggcaaatcttccaaactttctacctgatcattttgtttccttcagtagcaggaatagggaaaacaacaaattacttcccattctgtggctccagccatactcctgagaaatctgagccatcaaagtgctaatatttatcacagcatgttctgagggcaggagcacaggactagaggaaagcagcctgggaagccaaggccgtgtgtctgaggaggctgtcttggagttaaattttgcttccatgttctgcatacttggcggccttccaggacgccaccttgagacactcgtgagtggtgaagccaaaagaagacaaataccacttttgggtttgactcatttattaaaagctctgataccacattgcagactctgtagggtggctgaaagaaataacccggccatgagaaaggaccatctgtgctcaaccactccacctccagaagcactttcggcccctgcgtgaccaacaaagcgagatctgaaaccacaaaagtttctcgttacagctatggcctccatttaaaatcggaaatgatcacgcttaactgtccttgagagcatttgtttaaagtcaatatttaacttaacactccacttattttttcttactctttcgttaactttcgttctttcatgcatagagtcaacattcatgatatccttgttcttccccatcttcagttactcctgaggcgtggcgtgtgatgatgtcccttaaatcaggtcttttggctgagagtacgtgggctttggacactattaatattcttctgtatgatgacagcactgttgctactttcaatctctcccaggtaagccagcatagtccaactaacaaccaaattaggataggagagcatcaggccatgcacatttgtgcttgaactaatgcctgagttgatgagcactgaccgtccaacactgttaatcactgcagttgttatcaaccagccttaatcaatgtagagttatctgggataatattcactgtagtctttagtgtgtgtacacacacatacctctatttcttatgagagaacagtgactgtgtgtgtatgtgtatatgggatagatgacagtagtaacattaaattgttcagaatgaatattagctggccaatgggaagaaatcaaaatgtaacattaagttgtgactggagtcagcattggaaacacagttggttgcaatgggacataaccctgctttccaggaggacttgacatcttcttttcattaaaaagatattcaagatttagaaattttatattctatacatttatagaatgtataaatatatatagaaggagagagagcagtttaatgaacccccatgtacctgtcagtcagctaaaatagttatgaactcatggctaaacttacttcttagtctatgctctctcatttctgcctctctccaggttattttgaagcagtcatgtaaaagcctactacttttaatgagcttaaacccctcctttgttcagaggtaggcttcaggtagcttccagcataatagctagaagagaggagcactgaagtttggggaaaatgcccgagtccactgggctatagacttttaaagaaatatttagaaataaaaaatggaaaaaggtcattttccctatagtatacaaacaactctctactttgagtgcaaaaactaaaacacttaatttccttgcttctaaggaaataagaccagaatcttctacttctttcttctctcatttaagccctcattatcagcctagaaaggcaatttttcaattgctagaaagtttattaataaggtcataaacattgtacgagttctgtgttaacagaaaataagtatttaaaaactgtatactgcatttgctagagtaatgcgctttcatccttatgttaggtgaactgttgttgatcacatatttgcataaccagaattgctttattaactttcccttttcccctggaaaaaaaagggaaaatgcccttggaacattgtgccttcagcacactaaaagcagttctttctagttggtgctgggggcttcccctgacttcttaaaaattgttccaactctactttcaagaaactgacagtaggatatgaaggtatagctgatttccagaacatctaccgggaaagaatccttgttagaatccttgttacttactctttagagttcctaaacatggtggggggtgttgggagagagggcagttgctaatcgtgaagtgtattggttttttcttggtacagttgcttaaaggaaaccaaacttgttcttgtagtcagtggttctctcatagtggtttttgcctttcagctagagtcataaataactgaaatgtaaaattgcattttatgaaacattttaatttatttatcataggctaaattgatttgtttttaattttcagtgttcatgagctaccacattgctgaaattatcttctccaaaagatatatagagaacataaattagggtgacctatggtacctgagacaaaaataaccataaaatcctaagaataacaaccataaaaatcccggcaagcaagtctcagataaataatagaagagaacagagtcactttgggcaaaagagtctataaaatccatgttcccactcttctaataatgagtacattgtctctaaatcaggaacagaaaggtaaagaacagcaaggcactccctcagtgataagattagagatatgagaataaaaagtaagttttcgtgtagatagtctaagcaaggaagcagcaaataaggaacatgctaaacatcggtttagtttatactgtaaaattcaggaagttcgctggacctgaagggtagtttatctttcatggtccagccaaaaagggagacaaacgtgtgacaatgatggaaaggtattgacgggtctcaggatctttaccctcctcggtcatatctgatgtcatgacattgtacctgttctttctttcttctcctcctcctcctctccagttgtctggatttctcgaacttttagtcgagtactttagaaaatgcctgattgacatttttggaattcttatggaatatgaagtgggagaccccagccaaaaagcacttgatcacaacgcagcaaggaaggatgacagccagtccttggcagacgattctgggaaagaggaggaagatgctgaatgtattgatgacgacgaggaagacgaggaggatgaggaggaagacagcgagaagacagaaagcgatgaaaagagcagcatcgctctgactgccccggacgccgctgcagacccaaaggagaagcccaagcaagccagtaagttcgacaagctgccaataaagatagtcaaaaagaacaacctgtttgttgttgaccgatctgacaagttggggcgtgtgcaggagttcaatagtggccttctgcactggcagctcggcgggggtgacaccaccgagcacattcagactcactttgagagcaagatggaaattcctcctcgcaggcgcccacctccccccttaagctccgcaggtagaaagaaagagcaagaaggcaaaggcgactctgaagagcagcaagagaaaagcatcatagcaaccatcgatgacgtcctctctgctcggccaggggcattgcctgaagacgcaaaccctgggccccagaccgaaagcagtaagtttccctttggtatccagcaagccaaaagtcaccggaacatcaagctgctggaggacgagcccaggagccgagacgagactcctctgtgtaccatcgcgcactggcaggactcgctggctaagcgatgcatctgtgtgtccaatattgtccgtagcttgtcattcgtgcctggcaatgatgccgaaatgtccaaacatccaggcctggtgctgatcctggggaagctgattcttcttcaccacgagcatccagagagaaagcgagcaccgcagacctatgagaaagaggaggatgaggacaagggggtggcctgcagcaaagatgagtggtggtgggactgcctcgaggtcttgagggataacacgttggtcacgttggccaacatttccgggcagctagacttgtctgcttacacggaaagcatctgcttgccaattttggatggcttgctgcactggatggtgtgcccgtctgcagaggcacaagatccctttccaactgtgggacccaactcggtcctgtcgcctcagagacttgtgctggagaccctctgtaaactcagtatccaggacaataatgtggacctgatcttggccactcctccatttagtcgtcaggagaaattctatgctacattagttaggtacgttggggatcgcaaaaacccagtctgtcgagaaatgtccatggcgcttttatcgaaccttgcccaaggggacgcactagcagcaagggccatagctgtgcagaaaggaagcattggaaacttgataagcttcctagaggatggggtcacgatggcccagtaccagcagagccagcacaacctcatgcacatgcagcccccgcccctggaaccacctagcgtagacatgatgtgcagggcggccaaggctttgctagccatggccagagtggacgaaaaccgctcggaattccttttgcacgagggccggttgctggatatctcgatatcagctgtcctgaactctctggttgcatctgtcatctgtgatgtactgtttcagattgggcagttatgacataagtgagaaggcaagcatgtgtgagtgaagattagagggtcacatataactggctgttttctgttcttgtttatccagcgtaggaagaaggaaaagaaaatctttgctcctctgccccattcactatttaccaattgggaattaaagaaataattaatttgaacagttatgaaattaatatttgctgtctgtgtgtataagtacatcctttggggttttttttttctcttttttttaaccaaagttgctgtctagtgcattcaaaggtcactttttgttcttcacagatctttttaatgttctttcccatgttgtattgcatttttgggggaagcaaattgactttaaagaaaaaagttgtggcaaaagatgctaagatgcgaaaatttcaccacactgagtcaaaaaggtgaaaaattatccatttcctatgcgttttactcctcagagaatgaaaaaaactgcatcccatcacccaaagttctgtgcaatagaaatttctacagatacaggtataggggctcaaggaggtatgtcggtcagtagtcaaaactatgaaatgatactggtttctccacaggaatatggttccattaggctgggagcaaaaacaatgttttttaagattgagaatacatacctgacaacgatccggaaactgctcctcaccactcccgtcatgcctgctgtcggcgtttgaccttccacgtgacagttcttcacaattcctttcatcattttttaaatattttttttactgcctatgggctgtgatgtatatagaagttgtacattaaacataccctcatttttttcttttcttttttttttttttttttagtacaaagttttagtttctttttcatgatgtggtaactacgaagtgatggtagatttaaataattttttatttttattttatatattttttcattagggccatatctccaaaaaaagaaagaaaaaatacaaaaaacaaaaacaaaaaaaaaagagggtaatgtacaagtttctgtatgtataaagtcatgctcgatttcaggagagcagctgatcacaatttgcttcatgaatcaaggtgtggaaatggttatatatggattgatttagaaaatggttaccagtacagtcaaaaaagagaaaatgaaaaaaatccaactaaaaggaagaaacacaacttcaaagatttttcagtgatgagaatccacatttgtatttcaagataatgtagtttaaaaaaaaaaaaaagaaaaaaacttgatgtaaattcctccttttcctctggcttaatgaatatcatttattcagtataaaatctttatatgttccacatgttaagaataaatgtacattaaatcttgttaagcactgtgatgggtgttcttgaatactgttctagtttccttaaagtggtttcctagtaatcaagttatttacaagaaataggggaatgcagcagtgtattcacattataaaaccctacatttggaagagacctttaggggttacctactttagagtggggagcaacagtttgattttctcaaattacttagctaattagtctttctttgaagcaattaactctaacgacattgaggtatgatcattttcagtatttatgggaggtggctgctgacccacttgaggtgagatctcagaagcttaactggcctgaaaatgtaacattctgccttttactaactccatcttagtttaatcaaagttcaatctattccttgtttcttctgtgtgcctcagagttattttgcatttagtttactccaccgtgtataatatttatactgtgcaatgttaaaaaagaatctgttatattgtatgtggtgtacatagtgcaaagtgatgatttctatttcagggcatattatggttctcatattccttcctacctggtgcacagtagctttttaatactagtcacttctaatttaaactttctcttcctgggtcattgactgttactgtgtaataatcgatttctttgaaactgctgcataattatgctgttagtggacctctacctcttctcttccctctcccaatcacagtatactcagaatccccagcccctcgcatacattgtgtcggttcacattactcacagtaatatatggaagagttagacaagaacatgcagttacagtcattgtgagacgtgactctccagtgtcacgaggaaaaaaatcatcttttctgcaaacagtctctcatctgtcaactcccacattactgagtcaaacagtcttcttacataacaatgcaaccaaatatatgttgaattaaagacccatttataattctgctttaaatacatctgcttgctaagaacagatttcagtgctccaagcttcaaatatggagatttgtaagagggaattcaatattattctaatttctctcttacagagtacaaataaaaggtgtatacaaactccgaacatatccagtattccaattcctttgtcaatcagaagagtaaaataattaacaaaagactgttgttatggtttgcattgtaaccgatacgcagagtctgaccgttgggcaacaagtttttctatcctgatgcgcaacacagtctctagagactaatccaggaagactttagcctcctttccatattctcacccccgaatcaagatttacagaagcccacgaagaatttacagcctgcttgagatcatcttgcctataaactgagttattgctttgtcctaaaaattagtcggtttttttttttctatgaggcttttcagaaatttacaggatgcccagactttacatgtgtaccaaaaaaaaaaaaaagataaaaaataaaggtgcaaagaaagtttagtattttggaatggtgctataaagttgaatctgttggtatttgagtggatttttttaatgtcacataagagatactgggcggcgtctgctcagcaatagctattcacagtgttttgttcgaggaagagaatgatatagaagcatgttttactgatgaaggtggcctgttcaaagactagttaagctgttttttcagagttataatgaagaatgatttttttaagggcatatgggcagtctcatacaatgtaagctattaactacctcctttatgaaaagaagccagcctttgccctgaagtccatccatttaaaactgttggaaatctttcatttcctatcaaaccacatgtacctgttcccatgtctgttcacctttgaggaagcaaagaaagtattataaatgagccacaaatggacagtgcaaacagtccctgttcttcttgctgagtgttggttcacttctttatttcgagggccgtggcccagctgcctgaagtcctgctcagcaccagcctagaagaacttggaagtaaacttcatggtcaggcaagattgttaaaaactctgatgaatacacttggtagcagcatttaatctgcgaacaggcaacattactcatgaatttaacagagatgtgttgagcacatgctatgtgcctggctctgttctaggctctgaggagtcctcaataaacaatgaccctgtttcaattatgttctagtcttccatgtcagacaattatagaaataaactagtcttccaaatacagtgttttacattgaaaacactcagaacgctccatgtttatgcactgaacactttttttatttttccaaagacagggtttagctctgtcacccaggctggagcacagtggcatgatcatagctcactgcagcctttaactcataggttcaagtgattctcccacctcagcttcccaagcagctgggtttacaggcatgtgccacgacgcccagctatttatttttaagaactttttgtagagatggggtcttgctatgttgccccagctggtctagatctcctggcctcaggccacctctgcttcccaaacctctgggattacagatatgagccaccatgcctggctgaaaacactcatttttgttaagaaataaaagtaagatactggctattgaggataagggggtgtgatgagatgagctctggactgaaaatcaaaaacacttaaaaggttaagtctcatctggggtgtggcctgtaggctcccaactgtgctctgcagttgtccaaggccctcccgtttaagagctgctcctgcagagcatacagttcctggcctgcccaggctcccgccagcacgctggtgagtcctgatgtggaaggaaaaagcagcagtggcttggtacccggtgctcccaggctccaccatcagcccttagaaatgcaggaactgactgcacctgtacaaaggccgtagtcaaggcctcctgaccccaagccccacgctgtcaggtgcatccacgtgcatctccaggcactgtgctagcgcttctacccttgctttctggtcctggtttggttttatgatgattccaagtcatgtcatcctctaaagtgccaaagtcaaattgctgagttaattcactttgggatttaaaatgatgaaaccctgagggaaagctggtggggctggaggtgggaggggcaaccgtcaagtgtgtcctaaacatgagactcatttgtcttcttcctgaatctgatttcagggacttaaagttttaccccagctttttccaaagtgtattctaagaaacagaagagatctccaaaaaatctccttatgtattctcttggcaatccatagtccatattgccatattaaagatagaaatcctgcagaagagacacctgttataatccaggcatttcctgacttaattaaccttggaattaaaaaaaaaaaaaaaaaaagcaattcctgaaaacatgctgcagagctttgggaaacaacttcatccaccagtgctcatgcctggccattgccccggactgaatgctccttgcattcttactcctgaaaccaaaattaagatgtcctcatgggaggagagaacatggaatcttctcttgctatctccacggccttgagccaggtacttaaattatttgaacctcagtttccttgtctgtaatatgggcatgacacccatctcaggggattggtaaggattaaatgagatgattaaaggccttgtcacatgtgaccggtgaatattaaccccaaacatccatccatccatacatatagacttctcctttggctggtgtcctaaaatgtgtttcacacaaagtccaagagaatagcttcccattttcataaccagtcacacagcttgtgtgactctttgttgctgtttttggtttatagtaaaacgtnnnnnnnnnnnnnnnnnnnnaataattgagaaagcaggacctgtgagttttccctacagcactcctcattcctgcccacgggctgcacacatacataccccaacaacttttttactttttcctgttattcactttggagatttctcaaacattacatattcatatcccaacaaagggctgtctttggggaaaaaagcccaaagcaaacaccagttttcaagcgactatttccaatggttcagtgtgaaaacagaaagaggaatatcacttcccactacagtttgctttcagcagttaaaaatattagtatgaaatttcatgcagtacccacatctttctaaatatctgcttcaatggactaagccgttgtactgtaaaacgtccctatgtccatctgacctctacatcccaccacccttacacccttgaatctgcctggtcttttaagggcttcagctggcggccactgccctccccagcccggcccaccctgcttgggttctgcaaaaccccccatgggttcggcctccagttcactcctcagatccccacatctttctgattgaggatcccattctgttgtacccatatttaaaattgcccgtcatctcaccaaggccagcttgattctgcataatttctctaccgaatgtcagttttgggtgtccaacaccctgcagtggtggaagatcgcacctttttcgcagacctgggggaagcaaatctctggactacagtcacacagtaaatttgctctgccctaccctgccctaacctaagaaagtgtcttgtaacaccttttaaaggtcagatgtggcaggtggccgaccacagtgtttaatttgatactccttttcatctgacacacagcagagagagcccctctaaagaaagagcactacggtcttcacgcgtagctggagatgggctgcagtgctgtgggctggagaagtgggattcacgatactcttcacttcctggtaggcttaaggtcaggtgaatcaatgaagcttgagccttgatctgcgtaagtttggtatttagctggcccgggatttgtatatttacaaactagattttcccccaagagttaaggaaccgaagcttggatgaagcttggatgcggctcctaaagatggtcttcaccaaacaaaagcgcttccttcaggcaagagccacagcatttgtcgagttgcctcctggtaagtggtgattacttcacatttggatgttttttgcacttgaaagaatttcatggctattagtggttcttcacagaagccttggtatggaacattatcacatccatcctccaaaaacagaagcagaggctgacgcccaaaataacatgccgagttagaaccaagccgagaccaagaatgtgtatgtacccaagatattttgcagctttacacaaaatctgggggagaccagggacttttaaaacagaagccgtgatgtacattggccacagttagagggagagaggggtctttcgttaattcttcattctagagatttaatgtcatatgctcagtttatgtctgtgcctatattaaaatgatactgtttcacccaaaatcgggatggtcctggcagcactctgtctttgcatagcaggctctgccaagggtctccttcctgctgtcatcctcgtaatcctccagagcttccctgcatgttttgaggaataaatgtcattatcatccctccctggtgtaagcagctcctgttacagggctcacacctgcaccacctctttgggcctcccttattctaatgcccaaggcttgtgtgaactcctatgagcaactcaagtttgagtccgtattcgacacacctactctcttgagtaaaattcctaaagcatgtcagacacattttctgctcaccacgatcttcaaatacaccacagaacttttattgaaattgtggtttcttcaaaaaatgatctgggcccatgggctttcataaatgatattttatgctggacatggtggctcatgcctataatcccaacatggtgggaggctgagacaggaggatcacttgaggccacaagttcatgaccagcctgagcaacatagtaagatgtctctccaaaaaaaataaaataaattaaccaggcatggtggcacacacctgtagtcccagctacttgggaggctgaggcaggagaattagttgtgcctaggagttcaaggctgcagtgagctatgattgcaccattgcactccagcctgtgcaacagagcaagaccctatctcagaaaaataataatgggcagggcgcagtggctcatgcctgtaatcccagcactttgggaggtcaaggtgggcagatcacttgaggtcaggagttcaagaccagcctgaccaacatggtaaaaccccttctgtattaaaaatacaaaaattagccaggtgtggtagcatgcacctataatcccagctactcatcaggctgaggcaggagactctggaacccaggaggcagaggttgcagtgagccaagatcgagccactgcactccagcctgggcaacagagcgagactctgtctaaagaaattttttttgaattaaaataaatgatgctttatgataaattagaattgtgctgctgtcagcattaaccaaaccctggccaccttaaagctgaaattcatagtcatccagggagtgggcctgtcccgcaggaattggtgtaacattccgctctgggtttagttaggtcttggaagcttcgctgacttggggctactattccacttaataaatggcctctagaacccctattggacaacgctcagggttctgattcaatattttcttccatgtttcagttttcattcatccattgagacttagaagaagacacttgaggaatgacaagtgacaaaggacatttggggaggacactagttgcttaggtttggctcatggctataaaaattcaggtctcataagacagcttatttgttcctatggggggaaagtgacgtggtatatcttacacatttaagatgaatacacttagcatgattttttaaaattacccataagtgcaatggttgttttgttggttcagtgtgtttttcaccaaatggtgtgaacatatggccagagcttctcttggccataagatctgaagggagaagagtccccatggcaaagagccatagtgatttatccagatgagtttcaattccaaaggggagcttagagtgaaggcctctcctagccaacttttcacacgcaatcccctctccccacatttaacattcaacttctgctgtgtgggtaataggagattggaatgcatctgggaaaacgaaaaatgggttttgttaatgagtggaagttcatcttggtgggccctgttttcaaatattaaatgtgatatattagtttgtgggcttggatttgatttgagcaatcaaatcttgataggaactggcatctcttcccacccacccagagtctgtctttagcagccgttgctgaatggtgagatctgtaagtgccatgaattgctttcagtctgatgcttgagaggcttgaacggggtattgaacttagatttttggagaacactccttaaagcctcttgcctggcttcctttatggcttttcagtagttgaaaagtgtattgttttttattttcaggatggtggggagctcctacctcttccccaaccctcatctccccccccagctcagcaaaggtactggggtgaggggtcattacccccagagcagccaaagggtgcaagacccagctctgtcttcttaggaggagtgggtctttgtcaaggggccctggttcagagcctgctcacctccacacctctgtctatgtcatccctgcagcatgacagtgggcaaagcatgagcacagtctagcatgtaatcagcattcagtaaaccatcgtgctttttcattctgaaagcaaataacaagcatcatcgtgtgactcgtggggccacacacgtcagcaggtaagacccatccatggtgatggcattgccgagatgtgcacagggtgctgtgggaggatccaggagagggggagcccaccccggctgggagggagcaacctgggaaggcttcctgcaggaagctgcctttggagacagagggctcatcatatgggagagagacagttggaagagatccctgggcattctggaatctcgaaacgtaagagttcagttgtgggttttgaaaggttctgagggaggagttggggcgggtgccccgcgtctctcctgagaagctggccttggcgagatgccgggcaattttaaatatgggtacaacagaatgggatcctcaatcagaaagatgcagggatctgaggagtgaactggagaccgaacccactgggggttttgcaaaacccaagcagggtgggccgggctggggagggcagtggccgccagctgaagcccttaaaagaccagacagattcaagggtgtgagggtggtgggatgtagaggtcaggtggacatagggacaaaagggaacggggggtcctggcgccggtcactgaaagtggtgctgctagtcacagagaggccagatccgaggaaggcctgggctgggcagccagcctcggggagggggtttgtctggcaggattagggcccggaggcgtccagaacctctgaaggcgctgagctggtggcagagggaagctgaggttgctcaccagcgggcctttgggaaagcagtggatcccctgctatccacgtgggcaaaaaagtaccccaagggtctttgggaagcggaagacagaggcggaagaggcggctcagagagacgacactgcacagcgagggccagagaggccacaggaaggttcatggccaagaaaccaggaaaggcaaggaaacaggctgtaccctagagccctggggggagtgcagctctgccccaccgtgatgctagcccgggaggcctgtgcctgacttgaagccaccagaactgtaagctcgtccacctgtgttgttttaagtcaccaaatttgtggtgatttgttgcagaagcaacaggacactgatagaggggctttttgagtctgtggtgcttataggatgtccgaggagaaccggtgagggagcggctgattgcaggggtctgggctcagcaggtggagagggttggtgtcatctccatagaggtggggagtgcggggtgagtggagacctgagggtgggagcagattgccagcaagagcgtggaaggggcgggctggaaagaggaggcaagaaggacaggacggagagggcgggtggggcactgggagaggccagggagcccatgttggcaccaagagccaaaggcttccaggagatgctgccacagggcccaggctgcaggacaggcccagatggcagcagagggttccctcgattctgcaatgggagctcatggaccatgcagatgacagggccagcgttgggtggagggggggctggctgtgcagatgacagggccagcgtcgggggttgctgcccttgcccaccttcagggcctgctatgaaaggctgctccatggacacgccctttgagatgcttctcaggacaggggctcaggatcccccgtgcccagctcactcctgctcgggaaagcctgccccaccagcgaccttgcctctcctcatgcatgaaaatcatcctactttgctcttcacaaaagtgtgggtggagaaaacggccttcaacactcctcagagcacctcctcggagcggaagctgcttcctggggtgtgtttctgttctggaggttgcaccttcgatcctgaggcgtgggagctggcctgaggttgaaggtgaggctgaggacctgggtgaggctccccaaggcccccggctgggctgagcaaagaacgggagcgtgcccccaccactcacagggtgtccacacctggagaaggaaaccacaggctttgtcacctttgtcttaagtcagtgggacaaacctagaaagtgaggcattttggacagctccaaggtggctgtgtcctggcctgcccagaccgagggccccgggattctggaggcgcagattggatcccaggatgcatgactagtgactcctaaggtgggaacccctgggtgagcgaggagtgggaggccggtgcacatccaccttctgtcccggcctcctcttccgccggtcctgtatttctctcgaagtctcatcccggccatcagagcctcaagacttctcaagctcctggcacattctgaggtaagcacctaggttgatggtggccttctctccacacacagcacagccacgctggggagtgggggccggtgaatggcctggggacaggccacaagcaggcctaggtgggggtgccctggcctgctgtcccctccacccctgtcctgggagcctgtctgcaccagcacagaaagaatatcacggctgtcacccacagggcctagcagccgggtttttctcaccaagagctcgtgtggagagggacgcaacatgtttcccttttatgaggctgctccctgtccccaaaggtggggctgacgggtgttcctgggaaatgagagcctgccctgccctttccccggggctccctcgtccatgctcagcctcccagaagcccctcctgctgagttgcccacagccctccctgccggcctggcctctccttgcagctcttcctcttctcatgaaggtgtgtggaggttggggtttgcgctctctcttccttgattaaccttgccagaggcttgtctgttgcagagaacccgctctcagtgtcattgataccactcgctctgagtcatgaatttctcagcttaccctttcttctccttccctctagtttagtttgttctttactatcctgcttcttaattacaacatttattttcatttctgttgaattttgtaaaacacattccagttatcagttttccccagggaacagtggctcacgtctgtaatctcagctctttgggaggctgaggcaggaggatcacttgagcccaggaattccagaacagcctgagcaatatagtgagacccccatcttcacaaataatttaaaacttagctgagcatggcggcgtgtgcctgtagttccagctgctcaggaggatgggacgggaggatcgcttaagcccaagcagtggaagctgcagtgagcagtgatggcaccgttgcactccaacctgggtgaccgagtgagaccctgtctcaaaaacaagacaaaaaaaataccagttttcttctcagaacattcctatgccatgactgttgttttataaaaacccacaatggctgtgttcttttcctctcctactcatgattttttttggaggctcttttagtttgaaataggttttatttttccctgtttttccttgtactattgaattttagttttattgcattattatcacaacatggcttatataatttctatatttgatcacttttcatctcttatttcttccatcattacttctctgctcacgcttgccttctggaatctccaggaatacccaacagatattttgcgttcttgcctttttcttgtcttgttatttatt

SEQ ID NO: 141 - DNA, 7744 bp, Homo sapiens
gatctgtctggctccattgatgacctccccacgggaacggaagcaactttgagctcagcagtcagtgcatccgggtccacgagcagccaaggggatcagagcaacccggcgcagtcgcctttctccccacatgcgtcccctcatctctccagcatcccggggggcccatctccctctcctgttggctctcctgtaggaagcaaccagtctcgatctggcccaatctctcctgcaagtatcccaggtagtcagatgcctccgcagccacccgggagccagtcagaatccagttcccatcccgccttgagccagtcaccaatgccacaggaaagaggttttatggcaggcacacaaagaaaccctcagatggctcagtatggacctcaacagacaggaccatccatgtcgcctcatccttctcctgggggccagatgcatgctggaatcagtagctttcagcagagtaactcaagtgggacttacggtccacagatgagccagtatggaccacaaggtaactactccagacccccagcgtatagtggggtgcccagtgcaagctacagcggcccagggcccggtatgggtatcagtgccaacaaccagatgcatggacaagggccaagccagccatgtggtgctgtgcccctgggacgaatgccatcagctgggatgcagaacagaccatttcctggaaatatgagcagcatgacccccagttctcctggcatgtctcagcagggagggccaggaatggggccgccaatgccaactgtgaaccgtaaggcacaggaggcagccgcagcagtgatgcaggctgctgcgaactcagcacaaagcaggcaaggcagtttccccggcatgaaccagagtggacttatggcttccagctctccctacagccagcccatgaacaacagctctagcctgatgaacacgcaggcgccgccctacagcatggcgcccgccatggtgaacagctcggcagcatctgtgggtcttgcagatatgatgtctcctggtgaatccaaactgcccctgcctctcaaagcagacggcaaagaagaaggcactccacagcccgagagcaagtcaaaggatagctacagctctcagggtatttctcagcccccaaccccaggcaacctgccagtcccttccccaatgtcccccagctctgctagcatctcctcatttcatggagatgaaagtgatagcattagcagcccaggctggccaaagactccatcaagccctaagtccagctcctccaccactactggggagaagatcacgaaggtgtacgagctggggaatgagccagagagaaagctctgggtcgaccgatacctcaccttcatggaagagagaggctctcctgtctcaagtctgcctgccgtgggcaagaagcccctggacctgttccgactctacgtctgcgtcaaagagatcgggggtttggcccaggttaataaaaacaagaagtggcgtgagctggcaaccaacctaaacgttggcacctcaagcagtgcagcgagctccctgaaaaagcagtatattcagtacctgtttgcctttgagtgcaagatcgaacgtggggaggagcccccgccggaagtcttcagcaccggggacaccaaaaagcagcccaagctccagccgccatctcctgctaactcgggatccttgcaaggcccacagaccccccagtcaactggcagcaattccatggcagaggttccaggtgacctgaagccacctaccccagcctccacccctcacggccagatgactccaatgcaaggtggaagaagcagtacaatcagtgtgcacgacccattctcagatgtgagtgattcatccttcccgaaacggaactccatgactccaaacgccccctaccagcagggcatgagcatgcccgatgtgatgggcaggatgccctatgagcccaacaaggacccctttgggggaatgagaaaagtgcctggaagcagcgagccctttatgacgcaaggacagatgcccaacagcagcatgcaggacatgtacaaccaaagtccctccggagcaatgtctaacctgggcatggggcagcgccagcagtttccctatggagccagttacgaccgaaggcatgaaccttatgggcagcagtatccaggccaaggccctccctcgggacagccgccgtatggagggcaccagcccggcctgtacccacagcagccgaattacaaacgccatatggacggcatgtacgggcccccagccaagcgccacgagggcgacatgtacaacatgcagtacagcagccagcagcaggagatgtacaaccagtatggaggctcctactcgggcccggaccgcaggcccatccagggccagtacccgtatccctacagcagggagaggatgcagggcccggggcagatccagacacacggaatcccgcctcagatgatgggcggcccgctgcagtcgtcctccagtgaggggcctcagcagaatatgtgggcagcacgcaatgatatgccttatccctaccagaacaggcagggccctggcggccctacacaggcgcccccttacccaggcatgaaccgcacagacgatatgatggtacccgatcagaggataaatcatgagagccagtggccttctcacgtcagccagcgtcagccttatatgtcgtcctcagcctccatgcagcccatcacacgcccaccacagccgtcctaccagacgccaccgtcactgccaaatcacatctccagggcgcccagcccagcgtccttccagcgctccctggagaaccgcatgtctccaagcaagtctccttttctgccgtctatgaagatgcagaaggtcatgcccacggtccccacatcccaggtcaccgggccaccaccccaaccacccccaatcagaagggagatcacctttcctcctggctcagtagaagcatcacaaccagtcttgaaacaaaggcgaaagattacctccaaagatatcgttactcctgaggcgtggcgtgtgatgatgtcccttaaatcaggtcttttggctgagagtacgtgggctttggacactattaatattcttctgtatgatgacagcactgttgctactttcaatctctcccagttgtctggatttctcgaacttttagtcgagtactttagaaaatgcctgattgacatttttggaattcttatggaatatgaagtgggagaccccagccaaaaagcacttgatcacaacgcagcaaggaaggatgacagccagtccttggcagacgattctgggaaagaggaggaagatgctgaatgtattgatgacgacgaggaagacgaggaggatgaggaggaagacagcgagaagacagaaagcgatgaaaagagcagcatcgctctgactgccccggacgccgctgcagacccaaaggagaagcccaagcaagccagtaagttcgacaagctgccaataaagatagtcaaaaagaacaacctgtttgttgttgaccgatctgacaagttggggcgtgtgcaggagttcaatagtggccttctgcactggcagctcggcgggggtgacaccaccgagcacattcagactcactttgagagcaagatggaaattcctcctcgcaggcgcccacctccccccttaagctccgcaggtagaaagaaagagcaagaaggcaaaggcgactctgaagagcagcaagagaaaagcatcatagcaaccatcgatgacgtcctctctgctcggccaggggcattgcctgaagacgcaaaccctgggccccagaccgaaagcagtaagtttccctttggtatccagcaagccaaaagtcaccggaacatcaagctgctggaggacgagcccaggagccgagacgagactcctctgtgtaccatcgcgcactggcaggactcgctggctaagcgatgcatctgtgtgtccaatattgtccgtagcttgtcattcgtgcctggcaatgatgccgaaatgtccaaacatccaggcctggtgctgatcctggggaagctgattcttcttcaccacgagcatccagagagaaagcgagcaccgcagacctatgagaaagaggaggatgaggacaagggggtggcctgcagcaaagatgagtggtggtgggactgcctcgaggtcttgagggataacacgttggtcacgttggccaacatttccgggcagctagacttgtctgcttacacggaaagcatctgcttgccaattttggatggcttgctgcactggatggtgtgcccgtctgcagaggcacaagatccctttccaactgtgggacccaactcggtcctgtcgcctcagagacttgtgctggagaccctctgtaaactcagtatccaggacaataatgtggacctgatcttggccactcctccatttagtcgtcaggagaaattctatgctacattagttaggtacgttggggatcgcaaaaacccagtctgtcgagaaatgtccatggcgcttttatcgaaccttgcccaaggggacgcactagcagcaagggccatagctgtgcagaaaggaagcattggaaacttgataagcttcctagaggatggggtcacgatggcccagtaccagcagagccagcacaacctcatgcacatgcagcccccgcccctggaaccacctagcgtagacatgatgtgcagggcggccaaggctttgctagccatggccagagtggacgaaaaccgctcggaattccttttgcacgagggccggttgctggatatctcgatatcagctgtcctgaactctctggttgcatctgtcatctgtgatgtactgtttcagattgggcagttatgacataagtgagaaggcaagcatgtgtgagtgaagattagagggtcacatataactggctgttttctgttcttgtttatccagcgtaggaagaaggaaaagaaaatctttgctcctctgccccattcactatttaccaattgggaattaaagaaataattaatttgaacagttatgaaattaatatttgctgtctgtgtgtataagtacatcctttggggttttttttttctcttttttttaaccaaagttgctgtctagtgcattcaaaggtcactttttgttcttcacagatctttttaatgttctttcccatgttgtattgcatttttgggggaagcaaattgactttaaagaaaaaagttgtggcaaaagatgctaagatgcgaaaatttcaccacactgagtcaaaaaggtgaaaaattatccatttcctatgcgttttactcctcagagaatgaaaaaaactgcatcccatcacccaaagttctgtgcaatagaaatttctacagatacaggtataggggctcaaggaggtatgtcggtcagtagtcaaaactatgaaatgatactggtttctccacaggaatatggttccattaggctgggagcaaaaacaatgttttttaagattgagaatacatacctgacaacgatccggaaactgctcctcaccactcccgtcatgcctgctgtcggcgtttgaccttccacgtgacagttcttcacaattcctttcatcattttttaaatattttttttactgcctatgggctgtgatgtatatagaagttgtacattaaacataccctcatttttttcttttcttttttttttttttttttagtacaaagttttagtttctttttcatgatgtggtaactacgaagtgatggtagatttaaataattttttatttttattttatatattttttcattagggccatatctccaaaaaaagaaagaaaaaatacaaaaaacaaaaacaaaaaaaaaagagggtaatgtacaagtttctgtatgtataaagtcatgctcgatttcaggagagcagctgatcacaatttgcttcatgaatcaaggtgtggaaatggttatatatggattgatttagaaaatggttaccagtacagtcaaaaaagagaaaatgaaaaaaatccaactaaaaggaagaaacacaacttcaaagatttttcagtgatgagaatccacatttgtatttcaagataatgtagtttaaaaaaaaaaaaaagaaaaaaacttgatgtaaattcctccttttcctctggcttaatgaatatcatttattcagtataaaatctttatatgttccacatgttaagaataaatgtacattaaatcttgttaagcactgtgatgggtgttcttgaatactgttctagtttccttaaagtggtttcctagtaatcaagttatttacaagaaataggggaatgcagcagtgtattcacattataaaaccctacatttggaagagacctttaggggttacctactttagagtggggagcaacagtttgattttctcaaattacttagctaattagtctttctttgaagcaattaactctaacgacattgaggtatgatcattttcagtatttatgggaggtggctgctgacccacttgaggtgagatctcagaagcttaactggcctgaaaatgtaacattctgccttttactaactccatcttagtttaatcaaagttcaatctattccttgtttcttctgtgtgcctcagagttattttgcatttagtttactccaccgtgtataatatttatactgtgcaatgttaaaaaagaatctgttatattgtatgtggtgtacatagtgcaaagtgatgatttctatttcagggcatattatggttctcatattccttcctacctggtgcacagtagctttttaatactagtcacttctaatttaaactttctcttcctgggtcattgactgttactgtgtaataatcgatttctttgaaactgctgcataattatgctgttagtggacctctacctcttctcttccctctcccaatcacagtatactcagaatccccagcccctcgcatacattgtgtcggttcacattactcacagtaatatatggaagagttagacaagaacatgcagttacagtcattgtgagacgtgactctccagtgtcacgaggaaaaaaatcatcttttctgcaaacagtctctcatctgtcaactcccacattactgagtcaaacagtcttcttacataacaatgcaaccaaatatatgttgaattaaagacccatttataattctgctttaaatacatctgcttgctaagaacagatttcagtgctccaagcttcaaatatggagatttgtaagagggaattcaatattattctaatttctctcttacagagtacaaataaaaggtgtatacaaactccgaacatatccagtattccaattcctttgtcaatcagaagagtaaaataattaacaaaagactgttgttatggtttgcattgtaaccgatacgcagagtctgaccgttgggcaacaagtttttctatcctgatgcgcaacacagtctctagagactaatccaggaagactttagcctcctttccatattctcacccccgaatcaagatttacagaagcccacgaagaatttacagcctgcttgagatcatcttgcctataaactgagttattgctttgtcctaaaaattagtcggtttttttttttctatgaggcttttcagaaatttacaggatgcccagactttacatgtgtaccaaaaaaaaaaaaaagataaaaaataaaggtgcaaagaaagtttagtattttggaatg

SEQ ID NO: 142 - protein, 1531 aa, Homo sapiens
MPPQPPGSQSESSSHPALSQSPMPQERGFMAGTQRNPQMAQYGPQQTGPSMSPHPSPGGQMHAGISSFQQSNSSGTYGPQMSQYGPQGNYSRPPAYSGVPSASYSGPGPGMGISANNQMHGQGPSQPCGAVPLGRMPSAGMQNRPFPGNMSSMTPSSPGMSQQGGPGMGPPMPTVNRKAQEAAAAVMQAAANSAQSRQGSFPGMNQSGLMASSSPYSQPMNNSSSLMNTQAPPYSMAPAMVNSSAASVGLADMMSPGESKLPLPLKADGKEEGTPQPESKSKDSYSSQGISQPPTPGNLPVPSPMSPSSASISSFHGDESDSISSPGWPKTPSSPKSSSSTTTGEKITKVYELGNEPERKLWVDRYLTFMEERGSPVSSLPAVGKKPLDLFRLYVCVKEIGGLAQVNKNKKWRELATNLNVGTSSSAASSLKKQYIQYLFAFECKIERGEEPPPEVFSTGDTKKQPKLQPPSPANSGSLQGPQTPQSTGSNSMAEVPGDLKPPTPASTPHGQMTPMQGGRSSTISVHDPFSDVSDSSFPKRNSMTPNAPYQQGMSMPDVMGRMPYEPNKDPFGGMRKVPGSSEPFMTQGQMPNSSMQDMYNQSPSGAMSNLGMGQRQQFPYGASYDRRHEPYGQQYPGQGPPSGQPPYGGHQPGPQQPNYKRHMDGMYGPPAKRHEGDMYNMQYSSQQQEMYNQYGGSYSGPDRRPIQGQYPYPYSRERMQGPGQIQTHGIPPQMMGGPLQSSSSEGPQQNMWAARNDMPYPYQNRQGPGGPTQAPPYPGMNRTDDMMVPDQRINHESQWPSHVSQRQPYMSSSASMQPIWPQPSYQTPPSLPNHRAPSPASFQRSLENRMSPSKSPFLPSMKMQKVMPTVPTSQVTGPPPQPPPIRREITFPPGSVEASQPVLKQRRKITSKDIVTPEAWRVMMSLKSGLLAESTWALDTINILLYDDSTVATFNLSQLSGFLELLVEYFRKCLIDIFGILMEYEVGDPSQKALDHNAARKDDSQSLADDSGKEEEDAECIDDDEEDEEDEEEDSEKTESDEKSSIALTAPDAAADPKEKPKQASKFDKLPIKIVKKNNLFVVDRSDKLGRVQEFNSGLLHWQLGGGDTTEHIQTHFESKMEIPPRRRPPPPLSSAGRKKEQEGKGDSEEQQEKSIIATIDDVLSARPGALPEDANPGPQTESSKFPFGIQQAKSHRNIKLLEDEPRSRDETPLCTIAHWQDSLAKRCICVSNIVRSLSFVPGNDAEMSKHPGLVLILGKLILLHHEHPERKRAPQTYEKEEDEDKGVACSKDEWWWDCLEVLRDNTLVTLANISGQLDLSAYTESICLPILDGLLHWMVCPSAEAQDPFPTVGPNSVLSPQRLVLETLCKLSIQDNNVDLILATPPFSRQEKFYATLVRYVGDRKNPVCREMSMALLSNLAQGDAARAIAVQKGSIGNLISFLEDGVTMAQYQQSQHNLMHMQPPPLEPPSVDMMCRAAKALLAMARVDENRSEFLLHEGRLLDISISAVLNSLVASVICDVLFQIGQL

SEQ ID NO: 143 - DNA, 176771 bp, Homo sapiens
  misc_feature (1)...(176771): n = A,T,C or G
aatgttctgagtgtggtagacaatataacagaaattgaagacagggactttgtccttgagaaattgatccatccagctagggagatgaaaattaccttaataaagtacagttatcaaacacttctggtgtgccaggtgctgtgctcagagctttgaagaccttatttcactgaatcctcagaaacctggggaagtaagcactactgcgatctgtgtgttatacaggagtaaaccaaggtttgggatgtttacaaactcttcaaagggttgttgtgaggattatgtgagaaaccataatgcattatatcagttgggtttacatgtgattttctacaaaaaaaaaaaaaaaaagaaagaaaaagggggaaaaaagaccaaaacaaagcaaaaaataccagaagcttaaacaagacagaagtttattcttatttctcatacacgaagtcaggaggtagacagcagctgagctgccctgagcagctccgcttgagcgtgtggacgtactgacttccaagggaatatgcaaaatgtcgatttttttaaacaggtggtcatgtgcccagctaaacactggggcttctgtaactaaaggtgggaagaacagatattgggttagttaggcaacttgcttctctgccgtatgtatgcaaagtgccagacacgggataaacatactaagtggtatgtaataacagttacaaagctcaatgcagcctagaggtggtttggttcattgattaaatacaactctttgtgtctgaggttttctcttttttacgcttgtgcactatccctaaacaggtaagtgaatgagaacaagggagggtgtaccgcaggccgggggcatccccatccccgcttgggccagcttctcctttaccttttccagagattcgaggtggtttgccctaaggtttcacacctgtgtgaaggtggcaggaagcagccaagtcatgatgcaaagcaaggacgctgcccaggcctgggcatttcagcttctgcttgcctctcctgctccctctcagcacctgtgaatgacagctcaggtctctggcaaatgggaaaaacccaggacatgccagtcacattggacaagacatcctctgtatcagtgacaacaagcaagacgcccctcatgctgtgcaagcaggtggccctgagaaagggttggttgtaactcatggttaggtgtcttgaatttggtccatttattttgaaaggttttccatggatcatctcaatctcacaaattcctagataacagagaagatgctcaggctacagaatgttcccactgtgtggagttgaggagttgtcctccgcctcttaaaccttgaagcttgctttttcttttgagacaagttctcactctgaggcccaggctggagtgcagtggtctgatcacagctcactgcagcctcgacttcctaggctcaggtgattctcccagctcagcctcccaagtagctaggactacaggcacatgtgactgtacctagctaatttttttttttttttatagagatgagatttcaccatgttggccaggctggtctcgaactcctgggctcaagctattcgcctgccttggcctcccaaagttctgggattataggcatgagccaccatgcccagcctgaagctttctttagagctaagtttctatggtgagcagggttggcttatcagagcagggctgggagagcaagctgggtaggactgatgggtagtgtggaatggtctggacggcagggataaaagctggaatctccagttgcttcatgccaatatggtttgggcaggaaagggtggagaggaaaaagaggaaagagaaggcctcggccctgccatcctctcacctccttatctaatctacgacctcattcttcagtgttacctcctcactgtctctctcatggaggccactgctagcatacatggagctttgtgtaagttagaaaaagacaccccattctccagtggactcagctctgtgccaggactcaatgagtagcatgcaaggccctggctgaatcagagcccccacccacctccttggccttgagcagtgagcaatctgcacattctgaagtagtggactctgtggggtcagttcacttatctctatccccatagtccctctggtccccatacaactccaccatctctcttttctcacttgggctatgcgcaatcatcacagataattaggagagccatttataaagaggcctacatttagacgcggtgttgttgccaggtacagttatacatttagtcctagagataacaacaactagattaaaagatgttcttcatgttttttgctttttaggttgggatctatgatcagctcacactgccctatgaattaaaaaataaataaatcttaagatttattctgcaaaaggcatatttgtatagcattgtattcttgagtctgtacattaggaatttaaaaatgtaaacattaaaataaacatttgtatgctcctcttttatggttttaaaaaatatcataatatcctcagagccgcaataaatgagagtggccaggccgccctggtcccagaggtttgagccccgactcccgggacctgccgcccgattccagctctggccgcactgccaacatgctgtcttcctagcagtggtttcttgctataacccagatctgatgtcagccccctgcttcaatgccctggttacttcccactgcttttgggtcacaagccctgatttaattgggcctgggacaagcatggtggtccctgtctcccagcatgcctgccctcaccctgctctccagtcccacttgcctcctgccgtctgcggcactctttcccttctttatttaatgttttctcctctttctttagtgttcagcccaagtcacatttcctcagggaagctgtccctcagcccccagtctgcatcaggctccttggctatttccctcatagaaccctgtacctttccttcagaacccattgctttgtaactctccattagtgatcattcaatgaatgatccggtacattcaatgtggtcaagtgttattagtttttgttgttcactccagtgcccacagcacctagcacagggctagggcagagtaggtgatagacagttccttgtcaaatgaataattggggttgaggcaaggagtccccttcccagatgctccttgtgggttatgctttggcagggaaaccttttggcatgtccggtccttgagaaagagggtcacctatactacacagagtacagcttgacacaggtgtcacctgagggcccaagaagatgccagggagagctcactgaaatttaagtcttagagttacatgttgcaatgtaacttcaagttagagagagaaaaaaattctttatatttaacttgggcatttttaggggaatgggttaataagcagattcctcaatgaaattatgtcattttggtatgaaaagcatataaccaagtcctttggccctgaccaagacaattagatgactgtcataaacccttaaaggtgctcactgactcgcataatgaattagaaaccaagtcatcaggtataagcaaggtgaactaaaaacgaggaatgcgctccattaatgcacgagttattgttatttgggacttactgtttttgaaacatagtcttattctcaaagtttacctgtactataaagcaattaatcattatctgtgagagacctagaaggccttcaggtaagttcctgaaacttttctagaaaactgaggtgattcaactgccaagtgacttatttgtatacctgattatatatgcttactacccaaatatttattttgaggaactagagtggagttacctatgcaggacctttagccagccaggcagcatgttatcactaagaacggccacaaagatgactacatgatgtgatgtagaatactgaaaaacactggtaggtgctcagtaagtgattttcactaatggcaaaatgattgaggacagtactggaaataaaagcagccattgaacacacatttgtctaaaagttacaagaaatttataaatgaggctgtgataaagtcattcaaaagcggacagtccaggataaaataaaaagtacaatgtattaaaatgtagtaaggtgtttcttaatgtatttcactggtgttactatgtttctaaggaatttggagagaaactgtagtagcctgatgttaaacttaaggttctggaagtccagactccacagtggtgggttccaggtgtcaagtcggagttgtgtcagcgggaggattagggtcagctgcccgctaatggcagccagcaagcctccgctgcaggaaatgctgcgggatggggaaggtctgagcttgcttctttactggccaaatcccatgtgacattgaggggcagaccttagtaggtatgagtgattgttaattgtttatctcccctatgaaggacaggaccaaggtaattatctttcattttcaaggcatggcacaaggtagactctaggtaaatttgttgaatgactacatgcagtgtatctccatccaggtttattatccccacaataattttcttagtaagtttattagtgctaccgtctgccatagttcccaaatttgaactattttttttgcctaggcttctttttttttttcaaatcctacctaattgatttgcacagttgtttcaaatcaaatgctacatcccatatcttgcagtgacgcagttattcactgctaacgtctaaatcggagaagtgaaaaggacaattgtttcgtgctttcttaagtccctgaccaagatcagtagggaaatcccattagctctattcatcgcatttctcataaatctaaaaggaaagcaagtatccaaagctttattctttaatagttcttatttgtaaaaccttgacagggctttattctaaattgcttccaaattacataaagaatagttagaaatatgatgggcagtgaatcgtgatagtttcagtcatcgaataaataagtagaacagtaaaaggggactaatctgaaagcaaacagagtatgatgggctacgatgaggcaaaaagaacagaactgtggaattcttaaactaccatctggctcaatcccctttaagtggccaagttgaagagccttttattcagtgccctaaaacttattcaaaaggcgcagtatttgaatattaatatttccatacagtaaaaaaaaaagtcttttgtaaccaaaaaggaatgtttaacaaaataatgggtaatcctctggctaaacatgagggcgtggggagcaccctgtgggtgggaggtcggctggaacccagggtggctgcgggcagcctccgggccttcccctcatggcttctttgtggttagggtaacttattaaagttgtcattgtggtttgaaatttaggcaagaggtgtaaaattaaggaattcattaggaaaaatgagcgcagtgatttctagtaccttatttcatcaaaaagaaacaataaggtagaattgccatatgagatagttgaggcaaggaacacaatggaaatttgaacctgtggttgaaattgtgcttttgtgtaatgggaacctatttcatcactttgtaacagacccctgacaattggtgttttgtttgttaagccctggatgtttaaatgaaactaaacaggcttttattttgttttcctgaggtgtgtatgaaaagttgagcaaattcgagtgcacttcttatcttcagcaaagatgctttagaaaggtattttagcattctccgtggtttaaaagacaaaaccaagtcctgccggctttgtgttgtgcttctcctacaggctgcagtgccttctgtctgctttagggtgtggcatctgccattggggaggaaaaactggcatgtgtcgccttttatagcagactgatttcattgtgctgggggcctctattttatagtctcttagttccaatcttctagttgacttgctgaagcaaatggaattaaaagagattttgacttctctactaatttttttttagtttcacgatttgccaatatgaaaaaatattttaaggaaaagggccatagctgaacttggtgactcattttcccttttaggattagttgtgaaaataagccacaacatatggctacacttgtatgaactgactttgatatattttatcaatttgaaaaaatgcacttttaggatgatgtgtacatacttagtttgactatgtctaaaagcataaatatgtaattgattttagaatatatgtatatacacacaaaacagacatatatttatatttgcatatgaaaaactaaaaattcaacttctgtggtgtaatgcgtataattagtatgtatttgaatatataaagggagaaaatccaggaaaaaatgtcaaaaaggcacactaacaaagatgtagtattctcttggcaaaaactgatgaatgatttggcacgaattcatcttatggttctgttattctctctaacacacgatgatatatcccgttttccagttgtttgcgtagaattgcaatttgttgtttctacactctataatgacccttgggtgtgcacctgattccctccccccgaccccaattagtcaccagttttcccatcaatccttttctatttagtcatgtaacatatttacacttggtcaaacaaataaccactgctgcagtggaaatgaactaaaatagtttttatggaaagctgaagaatgaaataattttggaaaactatactctaccaaaaccgtaagtattgtttctgccaggttttaaatgctttctctcaatgaaaactgagtccacactagtacaagtgggtcattgcctaaggttaagaagtcttgctttttaaaatgttactaggggacaatgcacatattgaaaacattaataacaatgcaaatattaaaaacattataaaatgttaatagacaccaatttttaagagaacaaagtatggaacatttctacattaggactagagttgactgttttatattattattgaagttatatttattaaatataatgtctataatattttagtttcgttccacatctctttgaaatgaatgtatatcgagagggttaactgtgcacacgaagctctgaaacatgatgaaaggtgtcatatagatttatgaagatacgagctaacccatagctgtcgctgttctggcaccaagagttaaatgttcatgtgaaagttggcgcagaaaacaccactgtacatactccacagaggacatccaagtgcatgtaagaaaaatgctcctttgggaatacgtggacatattcctttggaaatacactgacaaacctacatacgtgtttaaggtgccttcaaaaagagttatgtaaacattctctttggggcgggtgcagtcagtcataagcatttattgagtacctactgggtacaggccatagggctctctgaccggggctaaccttcatttcaaatctttcctaattttgcagttggaagaagttgtgggaattacgccgatggcccgaaatcaaggcagaggcgaacgttctgaaaattacataactcctgggagagaccgtgcttttgcagattgcctaaatattttctttctccgtcggctccttgtaacctctgaggccaatagacaactttgtttcccagcccttctccctcttttgtctgctcgtcagactcgttttccacctttgtatcgttccttttagacgtgaaaacaaacatgcgaacgcccggttggcaaggagacagcggcccggggggaaagtgcaggttccggccgccccacgccgccgcgctccgagcggccgccgagccgccccggccccggccccggccccagccttagcccaagcccggctgggtcccgcgaggctgcgccggggcgggcggcggcggcccggggacgagtccagtccgcgttttgcgagtgcgcgggagtaatgcgagcgaagtggataatagttgctcgagctcgcccgctgcctctcaagccatgctgggcccgataggctcagctagtcgtgtatttacccatatccgggctagagaggaaaagagaaaagtttcatttaaacctgaactaaaaactttcaccatgaaagcacacagcaggagcaggcccagagcgtaaggcgtgcccggcccggcgctccggcggggcctgcggagggggagggggtcgcggcttcccggcgggccgcgtggatgcgcacaggaggggccgcggcctgaaaagtgggggttattgtctccccccgccccccgcccggcctcgccacgccgcggcgatcatggccgcgcgggcagcagcggcggcggcggcggcggcggcgcgggcgcgggcgcgggcaggcagcggcgaacggcgggcgccccccgggccgcggccggcgcccggagcccgggacctggaggcgggggcgcgcggcgcggcggcggcggcggcggcaccgggacccatgctggggggcggcggcgacggcggcggcggcctgaacagtgtgcaccaccaccccctgctcccccgtcacgaactcaacatggcccataacgcgggcgccgcggccgccgccggcacccacagcgccaagagcggcggctccgaggcggctctcaaggagggtggaagcgccgccgcgctgtcctcctcctcctcctcctccgcggcggcagcggcggcatcctcttcctcctcgtcgggcccgggctcggccatggagacggggctgctccccaaccacaaactgaaaaccgttggcgaagcccccgccgcgccgccccaccagcagcaccaccaccaccaccatgcccaccaccaccaccaccatgcccaccacctccaccaccaccacgcactacagcagcagctaaaccagttccagcagcagcagcagcagcagcaacagcagcagcagcagcagcagcaacagcaacatcccatttccaacaacaacagcttgggcggcgcgggcggcggcgcgcctcagcccggccccgacatggagcagccgcaacatggaggcgccaaggacagtgctgcgggcggccaggccgaccccccgggcccgccgctgctgagcaagccgggcgacgaggacgacgcgccgcccaagatgggggagccggcgggcggccgctacgagcacccgggcttgggcgccctgggcacgcagcagccgccggtcgccgtgcccgggggcggcggcggcccggcggccgtcccggagtttaataattactatggcagcgctgcccctgcgagcggcggccccggcggccgcgctgggccttgctttgatcaacatggcggacaacaaagccccgggatggggatgatgcactccgcctccgccgccgccgccggggcccccggcagcatggaccccctgcagaactcccacgaagggtaccccaacagccagtgcaaccattatccgggctacagccggcccggcgcgggcggcggcggcggcggcggcggcggaggaggaggaggcagcggaggaggaggaggaggaggaggagcaggagcaggaggagcaggagcgggagctgtggcggcggcggccgcggcggcggcggcagcagcaggaggcggcggcggcggcggctatgggggctcgtccgcggggtacggggtgctgagctccccccggcagcagggcggcggcatgatgatgggccccgggggcggcggggccgcgagcctcagcaaggcggccgccggctcggcggcggggggcttccagcgcttcgccggccagaaccagcacccgtcgggggccaccccgaccctcaatcagctgctcacctcgcccagccccatgatgcggagctacggcggcagctaccccgagtacagcagccccagcgcgccgccgccgccgccgtcgcagccccagtcccaggcggcggcggcgggggcggcggcgggcggccagcaggcggccgcgggcatgggcttgggcaaggacatgggcgcccagtacgccgctgccagcccggcctgggcggccgcgcaacaaaggagtcacccggcgatgagccccggcacccccggaccgaccatgggcagatcccaggtaaccctcgcgccagccgggcctgcttccgcccggcggcctcgccgcgccgcgagcctgagtttctttctttgccgcgtacttttccccgtcttccaccgcgggggcggnnnnnnnnnnnnnnnnnnnncttttccccgtcttcccgcgggggcggcgggggcgcggcgcccaaagccatcttgacgggcggccgcctcccgcccgcggtcggggcgccccgggggccggcgcgctgtccaggcctgggagggcttcgccgggccgggccgggccgggtggcttctaccccgccggcccgcacccgcgtcccccccctcccccaggcccgggaacgcgaagcgagatcccgaggcgccacccgcgcggtcgccgtttggggcggcggggaccgttcgggtgcttttgtaacaaataggctctcccggccaggacggctggggcgaagagccacccgatcggttctgggagcgcccacaatgtgctttaacgggggaaagaatgaggaactttctcccacctttagccacagcacgttccctcttggcttccgaggtccaggcagggaaaataggttagctttgtgacaagcgagtgggtttttcctacttagggagagccattcagagacactcggtgcgggcttcgagctcgaacgtttgctggtaggaataataacaaaatttacaacgacatggaggtgcaatattgtaaaatacatcgattcgttccttagaatagccagggaaatccattattgggcttacgggctgcttgcagggagtcaccttcaacaggcaggctatgtgaaaggagcacgttccggatcaattgaacttattttgatcatggattaggcatgcattttattcagcaaatccagtaagatagcagaccagtgaaaattgatcttttgggatcgtatttatttggattttctttattttgctgtcacccgagtcctacagcgctgttaggaagtgtcctgcactcttgctgtttcttgctagtaggctgagcctaaagactgacttgatctcctttgcaaggtttggaatttgaattgtggaggtaaactggctgtaatagtctccagacagctgcctctgagttgacatctaatctgccatctgattggctcccctctcaccattgggcatttagcactgctgatgtaaatagaagtgctgagcagtacagtcacaaaaattcttgccacaaataataactgagctctattacaagcaaatgtaaggttcagtatttaaagctgaaactattatgaatcatagttattaataagaggatcaaatacagaaaaacagttcgctggtgtccagtattgggcatttacaaaattcagatctttgatgatagtcttagaatatgcacattacatatatcatagactttaattggaggctgaggataaggccattgaaaaataagtaaaccacgaattttaccaatttttggatttgtaaagcctttataaaagtcttccctttacaaattcaactatggaaaaatttgaattctgtcagcacacgcagcttaataaaaccttaaaatttttttaagattttgataggcagcaatatattttggtgatgtgtaattcacctgataaacaagatttaagcttcatttttttgtgatttatcagttctgactgttcaaagatatttgtggatgaggagttttggttagaattgacatatttaaaaaacgaaatgaggaaaccacatatttgtgcagataacaataattaaaaggggaaaaatgagatattcctgtgaaatactaagaatcatttcatatttgcttttgatgtggagaatacagaaatgccccataatcttttttttttcttcattgttttgttagattaggtaatttgagccttgtttgaactgcttacacgatgaattagggaaactatattctaagcaagttgtgctgggtgtctttttttccaaataatttttctttcatgttaatgctatgaaagtttaaaaaatcctaatctgttagagaggaacaacagtcgttgtatgtatatttttatgtaactcatttattttaggaagaggtattttaacaataatcataccttagagacttgtcagagtgaaggaagggctgaatttaacaaataatcttgtgaatcctaggctgaacactgctgtccactgctttcagatctttagttattggagttttgcttttaaggataatagatttttctattcttaatagaaaacttgtgatttcaacttgtttttgattcacacgaggaaaaacattatagagaagaatcatggaaataaacccacgtaattaattttaaaaaggtttgctttgtcagcctgcttttaaaggagcagtttaaaattcacatcttcgtaaactagagacgaatgaagttagaggcagatgtaggaccatgttactttagagtatttttttcttaatggtaccaatcattttcagtattttgttttcttgtaatgagaatgaatccattatgtccctatgacccttgggaataggctttttttttttttttttttttttttttttgttgaggttgggggaaatatggacatgcgacctagattcaggaatttcttttaagtaccttaccgtgtaacatgtggaatgtgtcttttttacaatccttttttttcttttctttttggaagttagtattatttagtattagttgttgtaattatactaagaaacagtcatttgtccaaaatattaaattactgcctgactgtaggtcatgaaatgctattaaatcacattgttaaatgatgaaatattttggcttttaatatgtttttagtttcatttttgatttcaggaaatagtttctattgggtggcaaatgttttcgtaattgggacaaaacgtgtatatattataggagaagggtctttttaaaaagtgaaataagccatttgacgattcagtttattactagatttttgtaagatgagtattcagatggagcagtctcaaaaggaatattgaggtctactcacgcacataggttttatgatgtccacatttctactgaattccataaatgcagttttaacttttagttttataaaacgtagtacaatgtattaagaaaagggccttatttaccattagaagaaaagtgattagctagcatgcgaagcaggaagctacaaactggttcctgattaccttaaaatgtgtgtgagatacattatttgataaaatcactcccagttaaattttagggtgtctgatattttaaatcttgtaaacaaatttttgtggcctaaatttatatatttgccaaagtatggatggctgtgtatagttagaaaaggtggacttagtaactgtggctaatggaaagggcctatcatttaaaaaacaggaaaagaaaatataacaaatgtctgcagttttgttttctgaatcatctgggatgaaattatgcatggcttaaaatcgttttcattgggagtcctgatttttgtggtacatacttttgacaatattttggtagttttttttttttagtggtagccactctttaagacagctatcacttaggtttatgtttatattaatactacatcagtaagtatatgctagggactagcacatccttaccttgaatctataatgaggaaccttaacccctctttgctttggctctgcttgtctatatttagtcatgaatttttggcaaggctttttatacttgttccatttttctcaatgtcatagtgtatcagaagtgtgttatggatgtggaaataatgcagatcacacttggacacttttactaatatacttaacctctgaatgtcattttcctttactgaaattgaagaaaataacgtctttattctgatatttaaaaaaaaaaaacattaattctgatttgagaactgattttaaaaatgtaagacaatgtagaggaagacttaatataagctcatttgatcgttttattagacacagataccttttaaagagaataggtgtaatagaatgcggttgagttttcagttctattttttattaatagactttatttctttatgattctgggcagggtgtatctatctaaaaagatgacttctgatgtaataggaacacttgctttcctaggataaattccaatatcacaggcaaaccgaaaagatgatcatttcatttatttaaccctaccctttcctaggagatgagtgatttgatgaacatttgttagggttccatgaaattttctactccgtttggagactcactggggatgtaaattttggatgtgctggcctaggactctgtattcgcttttttgccggtgtcctcaatctggaggcttttcttgcagctctacactggactgacactgctcagctcatggggttgtgtgctttgatccatgtgggtggaaaagggactgatatttcactcgtgtcacttttgttttggagtgtatgtgtagatttgtaaatttgagattgatatttatgtttgatagaagtgtggtgtgttgcataaaatgacagatttatggaggctgaaaatattaataaaacttaattccattttttttttgcaatatttaggttttccagttggatgttataaaatttttatgacattttacactgctgttattactcaaggggccgtatccacctcttaggcctttttgggattgggtggttttggttgcatgccttttcggaggtgccctttcctgaatgggagggaggtttttgcaggttctctgtggatatgtaaagtagtgccgcacgcttgctgtgtgtgcttgcttgaggctgaggaatcccaaaccctgttccctgtcgtgtccgggagaggcaccaggcaaaactgttcctctaccaagaatatatttctgtatcatagatgtagaactattataaatatcttttctctagcttggaggctatttgaatgagactcaatggcccttttggtttaattgggtaattgagtgaattaattctgatctaaaaacttggtgtactttagcaactttttcttcaggaaatttggtaaagataaaatgacttaggtatcagtcattacctgagtgtcctaagtattcatttgtttttccttatactgacatctgaatgaatggaatgatagacatatactatatagttttaattagcaattcactttgagtgagtgaattttttcagagtagaatatgtgtttccactgtaagttttcactaaatatgttctattttcaaaatctttgacttggagtaattctaagaaaattctttccttacatttagttatttgtttttctttttgagacagggtctcactttgccacccaggttggagtgcagtggcgcgatcttggctcactgtggccttgacctcccagattcaagtgattctcctgcctcagccccgcaagcagctgggactacaggtgcacgccatcacacctggctaatttttgtatttttcgtagagatggggtttcgccatgttgcccaggctggtctcgaactcctgacctcaagtgatccaccctcctcggcctcccaaagtgctgggattacagatgtgaaccatcctgccaggcaagatttacttacttaaataggatccagtaggcagttttcaaacccacatctgtatggatcaatgccaagaatattagaaggctactgagtttgacagatgaactaatgatgaaattaacttgtttcttggatgagatttattaccaggcaccagactaaagccctaaaatcttaagcctatctggtttatgaatagctactcttatttccattattaaaatcaggtagatggcagcagaatctggaggagattcaccctctgttgaccatcttctgtaaggtgcacttctcagtgtcttcctgggccttgatgaatgatgagctggagaactagaccagaagccattccttatcaggtgactctggaagggaagccatatttgatgaaatccagaagaaatcctggaccataatgctacattttttctttttttgtaatgggatgctaaaaaattaaatatatggttttttttttaaatagaggtaagctatacgtacataacatacaacttaccatttgaaccatttttaggcatacattccagtggcattaagtacattgtcattgttgtgtggctgtcaccatcatcatctatccccagaacttttccttctcaaactgaaataaaaatatttttctctttcttttaaaattgttagctgctaatgtgtattgtaagtaaaataatcttgtttttgtaaccattaatcttatcacttcatagtttgtgagtaaattcttccgcagacattccatcaggatgctaatggtttttttgtttgtttgtttttgttttttattagtacattacttcctctcaattctaactttggggtaatcctcatagagtttgaggatctctttggagatgtgtattacaaaggttagtagtttcactgccagttatgttattaaaattttgaaaagcagctttttggaacctttctaaagtttaaaggttgagggtatttgttgagagaaacctgggacttggttagataatagggtgtggaaatgaactgttaccattctcacttttcccttgcttttcttccctcaccttttgcatttgtagtctcttaaaaattattaattttattttcccactattagtgaaaatcatttatagtgatatttttttctattctttctgtgtttgaagtttctgggcatctcacccctaccaacccagagcaaacccagagtctaggtggtgccatgtccttttccatagtgttctctgccaccaaatttgtgcctccccctcatgtttttactttttagtcctctgcaaaacttcagaaattctttgtatgtggaaaaattactaaattaagatgattgaccttttagaattacattttaaaggcagctgtgaagggagacttctagatcctgcctagtctcatgaacaggcgtctttggtttgtgtaaggtattggaattgtactggaattgctgctgatgctgataggtagtcacatctttgtaagatcagttatgtactttaacaccagcttccacagagaggaaatgaactgttacttaagagcttgtactgggaagcaatagttatttctttaaggtgtaaacatttagcatttgtgtatgcagtgaggtatatgttagataaatatctactccagacagtcaattggcaaatatttattgagctcccactttcttaatcagccctgtgccagagacagacaatagctggggtctggggattgctgctgttggtgtgcggatcatgcagagatactgctaacgcttgctccctccatacctggatcgtggtattgctgacatcattgacttagaactggctcatttaaacaaattgcagatagcaaccatgtgggtcagcagtctatttggcctgctttttttttttttttttccggtggggcagtatattttggcaaaacaaaatctggtcaacaacaattgtaggttgttgtgatatagttgatgtgatctagtgactcttttccatttctaccaatcagttactggctttgtgccagagcgaaatatagattcactaccgagaataataactaaaagaaggaaaatataatcactttcaaatttatatagaatggtcctttttctttttctcagttttctacattacatagattcttggaaaaaaagttaaaacagtctgttcagatttaggaagatacttggattgctggggtatttttggtaactgtttagataatgtatgctggctgaggagtaaattcagctactgcttctgggtcctgaaataaacctttcagaaagcgaggcattgatgattagtggaggcagttccagaattcttagtatctactgtttctttttgtgatgagcatcttagaagttaaaccactcaccatatttcatagccttatattgaaatgattgttaattctaaaattcatttagaagctggcgtctaatttgtgaaatcttgagaaccaccttttaagattcagtgaccatatatcaagctacacacccattttaatgccctttaaattttctgttaccactggtatattttataataaattcactctaactaatgaattataaatgaccttggaaataggaatgtggaacattgctactgctgagcaagtatctttctgaagaagcagacataattccgaggggactggcatgtttgctgtgtattagtttattttggtgattctgaggatttgtgagcgaataagcttctatgatgaggcatcctgacacaatggtaagatcatgggcttggagctggtcagaccttagctcatttggaggcctcagcacccattttctctgcactccagcagggggtcagtttccttacctggaatgttggctgctgggcagggttgttgaaaaccttcactgaggtcatggatgtctatctgtggcatctgtatgtggcccctctcttctctgcctacctgccttcccatgtggggcttgttttctcattctctgcctggtcctgctgtacttcggggtgtggctgactcaggacaagcccttgctggcatcaattaggtgatgctcagcccctcccagctccaaaaatctgtgctgctttgaatttttaaacaaatagtgcctaatcagctatgcaccgctgaacagcttattaaaccacactagatcccagacatattctgtgaatataaactgagacctgtgcaaatacatagatttttgcattccactgtagtttcccttacagaatgtggttttgtactgattgggactcttgctcagcagttgtataaattggttttggtttacccacagagcctacggctgatgccattggccccaagctgctaccccattcaatatcccatccctaatattaattagtggtctcttctctggccaacaatcattcctctgttatacttcctaaaccttcccactttgatgatctgcaaaaaatgactggctttttaggagaattactttttgcaaaggaacgaagttgcaaaaatttaaaagtaggcttcttggagattttgggtgctagactttggtctctcattagctaagtaacttgcttctgtgtttgcttcaacttcactgaatgtatgatttagacttgatccttagcaaaattataatttactatgcatggagggttagggctgctcttaaatagtcaaaacaggaatgtcaaatctaagagtaccggggtcctccctcaaatatataaagagcatttttttttaaatgctgagatttataaaactatcagggacaaaatgtaattctattatgaacaaatacttactgagcaccacttggtgcttaagatacacagagtaaagatgacatatgatccttaattttcccaggtgtattatcatagactcctggtgttttacaaagtggaaattaaagtgaatggctacagttttcttctgtagttcttatgcaaaaagactatattcctcaaagtgcaccatctaagaagtatttatggagtaaatgatgtatccaagctgaaactttcctaacgaatgtattattcatttccaatatcagttgcaaggaaatccgtttggtcagtatttgctattctatgtggaaggtcagtgtacttggagattgttctttggtgctgtgacgttgatgagaaagtgatcctaatttggattttgtattgggtgtcattcatatggtgatttttctgctaaagaaaagccttcacatcagtaacatgaaggatttaatactcagttcatttacttcactgtattgaactgtgtgcgtcagggctttggaactatagattcgtgtcatcacagcaataatgtgggcagaaggcacatgtttgtgaagagctcactgtgtgccaggcatcatgctgggtgatgggattctttggtgacctccacaaatggacaatgcaggaattaaggacaagtaaacatgctacacagtaaggtgtaaaggattttgtgaaagaagttttgatgttagagggtcactttatatagattaggttggggtggagttgaggcaggaaggctcctacagcaaaggaggtctgatgagctaagacttggttaatgagaaacaaacagtgaaggtaaagaggcatggggcttggggcaagggctagagccaaaagctggcaggttagagagcactggaagattatgcatttactagctgtgtgacctcaggcaagtcacttcgcttctctgtgctgtgtggtttcctcatttgtcaaagaatgggaaaggatacttaactcatggaattttcatgaggactaaactttataagaaacgtgtatgctgcttggcaatgaaaaggaccttttaatagagtaacaaaggattgtattttctcatgaataaggaattaaaatgagttagaggcaattctctattagttaatttaacaagttacttagcagcctatcggtctttcagagcaaataggtttatatttgaagcttagttctaatccataccatggcagttttcaaatttcctgatatgtttttaccttgtccagtgttaggaaaagtaagttattgagcaattctaaaatgtttactgtagtttgcctgttttttaagcagtcatatttttaactggtgaggaaataaattcagaagatttataattgaagaatttaattttcctaccatcagtaaacatttagtgacgttggtgtaggggcactgtaccacagaagtagatatccagaaaatatttgtaaattgttaaacattgtattaattgttgagcatagagtgatgtccttagattactgagtaaacagtggtgattaaattaattaagatagtttgtggggtgtttaaattttacttagtattccatttaattagaaatacagacaataactctggcctcataagcaatctgaattttgagttgaaggaaatgggtgtctggcagacaatttccaaattggtaaaatggatcttttgcttctactttattttcttcatgtattaaacaagtatttattattgttgactgttggaaaattttaaaaattacagtcatactttttatgactttgctgggtgtggaaatcatccctttccccccatcttagtgccaactgcctttaacctgaattggctgatgcagaacgcatttcaggaaggcgccatgcatacaggaggcagagacatgccctctgcaatcctgacttttcctctttcacccatgtctattgtatatggcaagactctgtccttcctcctccactctgatattggtcggagacacaagcacttagaagcaccagtgttttattctacaattaattactgaagagggaaattgaaaggtaagcagttttgtgttttatcttttattatgcattaagtttctgtaattttccatattgctatattattagtgagaaagagaagaatagagaaagatggagaagatgaattttatttaagacagttatatttggataacttaaaagaatatgcttttttagtctaaataccctttcccagtctaagtagtttcatgcttcatggaaaaactaatgcaaagaagttgtaatcagctgttaagatatttgagccagctggctgtcaatatgttgaagttttattcttggtgcatccacaaattccatataaatgtattttatgaagaggaaggtgtactagcatggctaaactggtaaagctgaaatctggatttgatttgcatatgtggtatttttcagggactctcaaactttcacacatgaaataaacgaggtaatgtgtatggcatcacatgatcaaaatatttttccccttgctgctgccagagctatctattgcttttcaacagtctcacttgttgggcatcatgccaagatgtttaagacaaccccttacgtgagctgttccattcttaacctctttgactgaagtgccgtgaccttcacatatgtagattagccatgtgctctgtgaattgaaacttgctgcctcaggaagaaaagggtttttctttttattccactgggaatttgacggccattcatccctgacctgggcagaggtaatgcaaggaaattggattcaaacggaacacggacagataacacagggaggcagtcagcgtgtacaggcaggcaagctttctacctggtccagggtgaaaatacccaccgtctgttcacaatgtgctgatgtgcaggatccgaagagcaactgacagatggagatagagagataaatgtaggaattctggaaccgtgtccttttaaaaaaggacattgttattatgggcattgctaattcgttttgactctcctctttctcttcctttccaaactatatttttgaaatctttgaatttttgtttatttcctaatgctaggaattaaatacttttgacatagtggacaatttagatgagtctttcaaaagcagaaatctttaaaaaaaaggagagatgaatgtatgacctgtatctggaattttgaaatgaattgatacttagaactttactcatatgagagttattagctttgtaatagctgagtatttttattatagcactgttatttatggctcttctaagtctttctctaaacctacatttctttatttgagaggcaagaatgagaagcagcatatccataagagttttgccaatcactcctgactagaatgacaagctgatttcatgtttccccaagtatcagtcctatgcagccccccctttttaaaaaaccatgcaaggccggacccagtggttcaacacctgtaatcctagctctttgggaagctgaggtaggagaagtgcttgaggccaggagtccaagaccagcctgggcaacatagtgagactcatcatagtgtaatgatgaataaaagtaattaatagcacatttttggatttttattagacaaagctagttttaaagaacatttatctttgccttgttaataaacatacttgcagttagtgtaaaattcagtataaataatagtcatggtgcttgagtaggctgataggacgagatgcataaggaaggttgtcgttataagaataatgggtctgaagtggtactccagctagtgtcttagcaaaaggaggggtgcttagggcagtctgaaatttatgagtgcttttgtatagctttcaaagctgagcttttcctgtgtacattagggtttatgaaatatcgtgggtcagagcatccgttacaggcgctgtgggagctgtcatagatacctggctctttccgtgggtgtaaaataggtttagtccttaggatgtctgtgtagggaatgtgcttaatggatacgatagactatgggggaagcagaattatccttttatccgaggatgacttgtttctttttaaatgaggacaatgaaaaaaaaattgggggaagtatcttatcacagtcttgtagaatgtgggggctttcgtggactgcagttcgcatggcaggcataaggagcgctaatccagtgatgacagcatctttatgcctacctgggaagatgcagcagccagcacagccctaatatcagattaataccggggtgggggcatgaggcatggctggcacctgagaaggcaaaagggaattctgtgattggagaagaagcaaggcaggtgtgtcattaaggtcaggatggccaagtggagagtggtcctcctggtgcacacagtgaaggagagcagccagctgggtgcagaggaggcagcagaaatgtcagggtgtccgtgagtcagcagctgagcattgtgggattttttttccttttctttgagacagggtcttactctgttgcccaggctagtgggcagcggtgaggtcatggctcgactttctgggcttaagcaatcctcccagctcagcctcgtgagtatctgggcctacaggcacatgccaccatgcctgcctacttttcaaaatttttgcagagatggggtctcactgtgttgcccgggctggtcttggactcctggcctcaagcagttctcctgcctcagcttcccgaagagctaggattataggtgttgaaccactgggcccggccttgcatggtttttcaaaaagggtgggctgcataggactgatacttggggaaacatgaaatcagcctgtcgttctagtcaggagtgactggcaaaactcttatggatatgctgcttctcattcttgcctctcaaataaagaaatggaggtttagagaaagacttagaagagccataaataacagtgctataataaaaagcaatagtaatagtaataatgactaccattaatgcactcctagtatgtgtgccaaggcacattgcacgtattatctgcaatcctttcaacagtcttgcaaaagcatcatcattatctctattttatagacaaggaaactggtagaatttagaaatttgttcaataccctggtttttctggtgctaaagcctacattctttccactaaactagtggttttcaaacccagttgtgcttcagaatcacctagggaagtaacccctgcccccaggaactcagatgccatcaggctctggagtggcctggaagcccacctttctgtctgtcagtagggccactgaagagcaagtggtaacatttaaaaaaaaagacttcttttttgttattgctaagacatgtaaaattgcattcttttttttttcttttctttttttggagacagagtcttgctctgtcgctcagcctagagtgctgtggcatgatcatagctcactgcaaccttgaattcctgggcccaagcaatcctcccaccgcagcctcctgagtagctgggaccacaggcgcatgctacaatgcccagctaatttttaaattctttgtagagatgggggtcttgctgtgttgcccaggctggtctctttacattctgggcggctcaagcaatcctcctgccttggcctgggaggcctgggagtctgggcgtagtcattcacatgaaccatggagcctggcacattcttttttttttttttttttttttttttgagacaatttcacatcatcacccaggctggagtgcagtggtgcgatcttggttcactgatcgcaacctctctctcctgggctcaagtgactcccacctcagcctcccaagtagctggagttaaggcacgcaccaccacacctggctaatttttgttatttttttgtagagacgggggttttgccatgttgcccaggctggtcttgaattcctgagctcaagtgatccactcaccttggtctcccaaagtctgggattacaggcgtgaagcccttctgcacctggcccacattcttataattcaggagcttttagtgtattttggctctgtagtcattatcagacatagaagaggcaagaatttgggctacaagggctggagggtggcattgggattttctgatcacatcaccagacattaatttacatttgttcttcagggaaactccctaccattatctgggtcattgctccctaccaccgtctgggtcattgcatagttacccagggtggccgtgaactagtcagcagccatttagaggaaagcctgcttggcttggctggttcaggaggcggaggctgctgcagggcctgggaaggagtaaggcagcacacggtggctgttaggtcatttgtgttggatgaaagagagttggtgcacagactggacggtgtctcagattcgctggggtttacgagtccagaaatccatgagtccgaggaagtgggaagagagaataagggaagggaggccggaaggtaggagagaaggggaaatccaggcagccggatgagagataattttagagtaagaaaccaacaaaatataatattcattatgtacccagattgaagtactatggtgctaaaagttgtcaaccaaacaccaaaattagcatatctaaaaatcatcaagacggtaatgcatagttaaaagaacagatgtaaggcagaaaactcctccagttcttcagtgaggttatttcatgacatagagtcttgattatttctgtctttgtagccacacggtcattttggagccagattcagtggtgttaggaggttgtggaaagcactcagcggacaccttctttccctccctccccaggctgcccaggcctcctcaggtgtgggagggctcccgagaccctctgcgcccttccttctcttccttattattactgtgccttatgggtaaagtacagtactgggaagtttctctttatgtccccaactattcctctcttctaattgccaataaaactacatctcacagctttttaaaaaaaaattcagtttagctcataaccttgtcttagacaaggggtgtaagttaaatttcacgtaagcggtcctgctggggttcctgcgcggtgggaaagctcggcactgctctgctcatgcctgtttgcggtgggaaagctcggcgctgctctgctcatgcctgttgtctgggttttcagcgtgtgtgctcctcatctgctttctctctaatttgaggctgagactgtttccaagtggcatacccctgtaattctgtttttagcttagaattaaatgaagtctttgctgtctcttgtttcctatttcataatatttcatcttgctttattgtttatggtaatgtatcactatcagggttatcatggatttccagtttttcaagttaaagctgactgtgcctaacccatctcaagcaaatcagtgggcagtttatttttaagagcccacaggaagaaaaaaacaacaaaatctgtaacctgctttttaggcttttgccatgtgtctgtaagactggacctttacttttttttttttttttttaaacttatgaagggactgggcatcttcatgtcttagcagccacgtttaaatctctgtcattatgatgaaaggtatcttttgcctagaaagctaacacctgtctacttgtgttatttctttcagggaatttcagtagtaatgtatcattcatctagtggtaagattttcagcaatgagaacattctgaagcagctgagaaagccctaataaaataactgtcagaatgctcatgagcttctctctgttggagaagaatcaagccatttcctcctcttccaggcatagagaatagttatcctttttgccatattacaaggacagagtggagaagttcgtcatgcagctgtgggcgcaggctagtgtgtggggctgggggaagcagacaagtggtgagatggtgggctctgctaagccctggggtgggcgtaggagcagaagccagagcctggggcctctgagtgagtgggctcagtgaggggcaggcccagcctcatgtgctttgaggtctttgagagcctcagacaccaacctggtagaagaggcatttggagggatgccttccataccccaagaccctgggaaaggagagtggtgagtcagggttgggtgggtgggaggcctgagttgattgccagcagctgccagataccatgcccctttgtgtatatacttcctttattcatcaaatagctgctgccgtctactcagttgctgggtatctattcagtgcctgctgtgtggcagagtgttctaggggctggggataccacagtgacaaaacctagtccctactttcataaggcttaccttccagagaaatttaatcccagagacagcagaccaaccacccacatgggggtgctgccgtttattgtagggatgaacagcagtacaagggaattcaaaataatggaacattttcaaaaattggttttaatggagctgtagatgaatatgcagtaaaatcagtttggagaggagctatcgcagctatttctccagtctttcagatgcccggcctgagcctcttgtgccataggacagttgttaaatgtagcatttccattgcccgtggttgaaatgaccagtggcagccccgatgccacctttatttcctcaaggctggacagaagaaccttgcaagcgcaaggttcttgacctgactctatgggaaggaatcatacagtgctggattttttgaaggtgttcctgcttttggatcatctcatgtacttggtgccaggctgtggttttggatttggacgtgttgggttgagatggtttccagacagctcgatggagatgctggagcagaaggaaaagagggatgtgcagttgaggcgggcacaagggccgcagcctgaggtgccagctgagaggccaatgacactgccctgcggagcacgtgcctggtgaggagaggtgcctgggcgttctagggggcaccaacctttagggatgaagaggagccacccagagagccagaaagggcgatggaaaagctgaggagagttccacagggggcaggaagacatgcacaactgaggtgagcactgaggaatgcccagtaagcctgggggctgacattgtggtcatttcgtcactggtgaccttcagaggagtggtcgggaaggcggcagtttgcagtaggtggagcgagagatggataggaagccagaaaaaggctctggacagctggaagaggagcggggtgtttgatgtgttgttcttttgctggaagagggtggagcgcctgcgcctgccgctctgctttctctgctgggtgctgtgctggtcgctccctcctggggcccctgcatgtccacccatccttcctcctctccggtgggcctggagctgctcaggggaaggcgggagcacgcctggctctttgtggcccagtgcctggggtcgtgcctggcatgcggtggggctcagattatgctggtggtggtgatagagttcccttagcactcctaggtgacaggctttcccctctgcatttcacagattctaaggtaacgtacaacgaagggtgcatgcgctttggccaaggccatgttacatgatggtaccaggagtcagccctgaggcagatgaactccaaagcctgtgctgccctcgctccttgttgagggtggagaatatttcactacctttgtagactgaggggaagattatttacaaatatttccagaagattagttttgtaatatattgaactaccagtatattttggatgcctttgatctctttggtaaactggattgtcaccttgatgtagtgagtcagctggcttggtggaggcatctctgagtgtctggagaaacttcatagagattattgcatttggggagttagttttggtcattgccacttgtgtggcgaaaatcttgggttaaagcatggtcagcatgagtaaatgttgttaattgtacattttctctttaccccctctgaaaccttatgtttgagagctgtcattcaggattggatactaaaaaacttggcagttgtgaaatagttttctctctgtgtgtataggttattctctgatgttaaaatggctaatgctgcacaggtgtgtatttcctaccatatatttataaaaaaaccactctttaaatttcaactcgtgtacatgtcccatctcaagtctcaagtattacagactgtaggtcagattccctcatgatatgtggaacctcaaagggaaatcaattgttttgctgttgtagtgaaatactaagtattgaataattaataatataaaataattcatcaaataatttctaggtgccaagcactgtgctaagaactctatatgcattttctgtgaggtaggttctattactgtactcatttgaggcacacatctagcgagtggcacagctgcagtttgcactcaggcattctgaccccattgccttttcatatatgctgtattgcctctcaggagggactggaatgagtagagttggacaagtggtctgaatttacattgtgaaaggtggcgttatgatagattttttttattgcttgcttgcgcattcacatcagttgatatatatatatttggacacggagtcttgctctgttgcacaggctggagtgcagtggtgctatctcctcactgcatcctcagcttcccaggttcaagcgattctcctgcctcagcctcccttgtagctgggattacagatgtgcaccaccatgcctgggtaatatttgtattttttagtacagatggggtttcaccatgttggcaaggctggtctcgaactcgtgacctcaagtgatctgcccgcctcagactcccaaagtgtgaggattacaggcatgagccaccacacccggcctcaaatcatttgatattctatgaagatactggaaaagctgatgaaagatcttcctttccctccaagaggataccatttggttagagagacctgtgaaacagaatcattgaagaagctgcgcagtaataagactcccagccagcaggtgaaatgagttttcttgttttcggggtcctaggtgacatggctctaaggtgcccacccggaaccctcacccccacccctgccatggaaaacacttttattatacacatccctcctgtcccaccagttacaaagcagatttgaactgaagcgtatttcttcttttgatgagaatgtgaaaggggatctttgtacttggttagttttcattacaattcccctttcctaaagagaaaactcagaatcaggatgcatttcatgtgtctgaagaacctttttccaacataaaaccttttcagcattaaaagtatactctgaaatggctctgttcagtatggcagccatcagctttgtgtggctatttaaattaaaattaattaaaattaggttgggtgtggtgggtcacccctgtaatccaacactttgggaggccgaggcgggtggatcatctaaggtcaggagttcaagaccagcctgaccaacatggtaaaacctcgtctctactaaaaatgcaaaaattagccaggcttggtggcaggcacctgtaatcccagctatttgggaggttgaatgaggagaacctcttgaaccctggaggtgaaggttgcagtgacctgagattgtaccaccgcacttcaacctgggtgacagagcaatactccatctcaaaagaaaaaaaagcaaataaaataaattaaaattaggctgggcatggtggctcatacctgtaattccagcattttgggaggctgaggcgggagcatcacttgagcccaggagtttgagaccagcttgggcaacatagtaagaccccgtctctacaaaaaattaaaaaattagccaggcatggtggtgtgtgcctgtagtcccagctacctgggaggctgaggtggaggatcacctgagctcaggagttcgaggttgtagtgagccactgcactctggcctgggagatagagaaagaccgtgtctcttaaaaaaaaaattaattaaatgaaattagttaatgtctgcagtggcattagccacattgtatgtgctcagcagcacaatctgttgtcagtagctgtctgtcataagttgcaaaatagatctagaacattctcatcactgtagaaagctctctgggacagtgttctagagactcttgagttgcatcttgtagtatttataacaatttaaacctactagtactgtgcctggctcttagcaagtgtagaatgtgagctacttgaattttggatggctgtcagtagggtaggatcttgaataatcttttttttttttttttttttttgaggcggagtctcgctctgttgcccactctggagtgcagtggtgcaatctcggctcactgcaacctctgcctcccggtttcaagcaattctctgcctcagccttctgagtagctaggattataggtgcccgccaccaggtctgggtaattttttgtatttttagtagggacggggtttcatcatcttggctgggctggtcttgaaactcctgacttcatgatcacccacctcgccctcccaaagtgctgggattacaggtgtgagccaccgcacccggcctcatcattgtttttgaaactatctttgatagtacaaatgtattgcagttatctaaactttaaaaataatgaaaaaccattaaaaccacattataaacaaggaaagattttttcctctgcttgaagcatctatccaggttctgccatattgtctaaggatggtaagagcagggtggggtctgtgtttttgctttttttttagtagtagagaaaaggctgtttggaaccaaacatgtggaaggctgttttacttcactttgttttatatccactgaaaataaatgtaagtttagttagtgttttttttcttccacgatgtttgaaggaaagtccttgatttctgtctgtgttgcagtttgaactttaacctgtggcctggtagttgaaatggattgtgcattttggtgtggaaaaaaaatcgaattgctttctcgaaattgactaaaatgttttaactcttcatagcaaatgaggcgtgaaacaaattgtcaaaagcatggagacaaaattattgcagtactgaatgtttaactggttggtgctgttctatcgaaggtgtgagccaagcagataaatgtgtaaacggcacctttctccttctctcctacccaatttttcacagcttgtcttcacgaggagacctccatctatgtcagaaaaatcacagcccttctgaaagtgttagattatagtgttgctatgaggaataattaggaagtcctgtaggctatggattagaagaaataaacttcctgtttgcaaacattttatttcacatcatcattagatgaagcaaaaatacattttttagtgtctctgaaagcttgatgatatgtaaaggatgttagttatttatgttcatattctttcgtattcattcattgtgtttcattctacttggaatattttacccttctttttaggatttagtagtttgaataataatgcttaacctgaaaaataataaaatatttaaatcatatactttttagttttaaaatatcaaatgttaatttaaggaatgtccagaggtttaataaggaggacttcaaatttttgactgttccttcacttttctttttgaagcttctatttaggttcttaggttaggatttctcaagatccccacctattagatggctacagctctcctagcccctggggctttgatttctaatgtaggtcattgaatggccaaaacagatgtgccatacagagtgcaaagcttttaaataaggagaaagattatgtattggcattgtttttttgtggctaagtataagttgagggttattgtttatatttctaagtatttttagcatctcataagcaaagaggtggatgaatatatgtgtacatatgtgtttatgagtatgtagctgtgtgttatttgtgtatgtacacaatatgtttcacagttttattataactacaaatatgaaaaacaattaaagcgtgatccttatgctaatgcagctgattatacttttgcatgtttccatgtagtttttatttctgatgggtgtatgtgtgagtataaacattttttttctgtcctcccaacctattttgtttttttttaaattactgctatagcgataggtatatgtaaagagtataggaaattgattatacaacttccaagcaacgatgttttctttttatcagattgactctagtatgcagagatgatggaattttcgtgcatgtggtcttgtacatttattaagccttttcaatgaagatttaagagccaacattttatttatgaaattcagtccacatttataatgttgtataatagaaatgtatgtacatttcctgtgatttttcagtatagaagaataatggatcttgcaaagattgtagttgctgttacttacctttttaagagagaaccaaaatattttcctttcctttcctttcgtttcagtgttctctaagctgtgtgtctatctataaatctttatccatccaccatcttcctccctctgtacttacctgtcttaaacttacctagacttacctttgccttcgttttgcatttatgatttttccctcctttctcttcaagtgaatgctttatttttgttttcatggtgtgtttttttcttgctttcattttatctttttctcttttttttttttttaaattccttttttgatctagttcttcctgcccctccacagctgcccacattgagtgggttagttgtaagtgtcccattccacatcctgtcttgggtgggctttcctgtaagatttttcctgggtgtctgttattacctttttttccaatacatattaaaacaattggccatttttcatcatgtttaggaaacacttagccttgttttcctcatctgcaaaatagggatgatgaaacgtaatttacgtggttgctaagagagctaaattagttgaggtgtgtaaagcatatagctttacatccaatgtgaaataagtgttcattaaatgttagtggcagaggtaatagtagttgtaacgttgaattgcctggtatgatggagaatgtttctaaagaacacccctcaaggctgggcatggtggctcactcctgtaatcccagcactttgggaggctgagactggctgatcagttgaggtcaggagttcgagactagcctggacaacatggtgaaaccccatctctaccagaaaatacaaaaattagctgggtgtggtggtgcacgcctgtagttccagcttcttgggaggatgaggcaggagaatcacttgaacctggaagcggaggttgcagtgaactgagattgcaccactgcacaccagcctgggtgacagagcaagactccgtctcaaaaaaaaagcaaaaaaaaaaacacccctcaattttggattacattgataattaggggccagatcataaagagagctttatttactgtattagtttgttcttacactgctatcaagatatacctgagactgggtaatttataaaggaaagaggtttagttgactcatagttctgcatggctggggaggcctcaggaaacttagaatcatggtagaaggcacctcttcacagggtggcaggggagagaatgagtgcccagcgaagggggaagccccttataaaaccatcagatttcgtgagaactaacacaatcacgagaacagcctggaggaagccatccccatgattcaatcacctcccaccaagtccctcctacaacacatggggattatgggaactataattccagataagatttgagtggggacaagcctaatcatatcaacgtatcatgaaaagattacattttattccaggggtcatagaaaccattgaagaattttactactaagagagatgtgatctgattggcaaaaaaaaaaaaaaaaaaaaaagaaattggccctttttgtgtcttaatgttcctatttcacccacccttaaaatataaaatttaaagattaggcagtattactaatggccagtacttataaagtgacatgtaaataggacaagagtttaacaaatgtaaacatctcactaaattttagtacttcacttaccaacccttggatgtttagctaataattgctaattataactatgcatttgtttgcttatactactctggcaggaacaggcctctctcagcttactcagtaggccaagttagagattctgggttgggccctagtttttcagggatgtagtattggctcattggatttaaatcttagggaaaatctggtggagacactttgcctccacctgcagcctgctgtgctggatgtgtagtgagggaatgagacaggataggcccgagagtaaagtggtctgtttgaatccccagttctgccactcattttttgtaaaatgggaataatgataatatctaagttctggggttattttgaggattaaatgaggtcgcatgtttaaagcatataggatgttgtccgagtgtcagcttttattgttaccattactattcttgaggaaacctagcaggtttacacttcaccaaggaagggcagctattggtttgcctataggagtatgctctctctgctctcagagggcctacaagaaaattttttttctatccaaatgtcacctttgcttttattttctttcctttccatacacggaagaaaaaataggaaaaagaattacatatactttgcaactttttaattatttatttaattttatttttttttagagacagtggagtgcagtggcaccattgtaactcactgcagcgtgtaactcctgggcttaggtgatcctcccatctcagcctcctaagtagctggaatcacagatgcgcactgccacaaccagctaatttttaaatttttttgtggagatggagtctcgctgtgttgcctaaactggtctcagagtcctggcctcaagtgatcctcctgccttggcctcctgatgtgttgggattacaggtgtgagccactgtgcccagccacatttttcagctttgaaaccctgtaatgtgagttccccctcactccagttagaaagctcatttctaatttccgtattggccactttttctgtgtcacattcactaaattaggtttaatggtgggtcccaaaatcataaccataaaccttgttgaggttctgttttcttgtccataaaatggggattaagtgaattgctggaagggtgcgttgcccaggtcctcaataagtgataaactcacgttcagcacattcaacaaacttttaaaggtttttaaataaaaaaagcaaaggcttatggtctttggaaggttcttttagtttctcaagttgggaccccatgccttaccgtgccactgagttgaagaacaggttctacctctggctttcagaacctccttagagctggtttggaggtgttcctgctctctacgtgtcctttcttctaaaaacacatttcacaaaaatacatttcacagactttactgtatcatattttcaaccagagtttaaatggggattgtttggttttgcttaataatactactttacagatgatttaataatttccaaagtgcttttcttatctagtcctcacagtaatcttgcgaggtttggttaatatccctgtttcgtgtgtgctgaagcagaagcacagtgacttggctaaggacacgactttatttcaaaccaggttttgtgacccaaatctgagcttttgcacctcacactgttgctgtggtgtgttacagtgattctttagcttagagacacgtttggatcagggggtcagcaaacttttcctacgaagggccacatagtaaataattcaggttttctgggccagatgatgtttgtttcaactactcagctccgctgaggcagtgctgaagtgtccatagacaatccgtaaatgaacgtgggaggaggctgcgtgccagaaaagctatggatgctgaaattgaatttcatgtaattttacatgtcttaaaatattcttttgatttctttcccccaaccatttaaaaatgtaaaacatattcttagcttatgggtcctacaaaaaccaagcggtggaccagatttgtctggaggaccgcagcttgccaacccctggacagcgtgcgtttttccatttccagttccgtccaagtattgtgcacccccccaccccccacccagtgaagcatctttgtttgcacaactctttattctctagcatctcagctaacaggaagctgggagaaagttcagatctatggagtggaagagcccagggtgaagggagccagcggatcacgtggtgtcggaaacgccttaagcaagaagcttgcatgtcagaaaccaagctcagggttctctgttgtgttttggtttttactgcccgccatctagttgagtttcttcatgttctaggagctctgtcagttctttaatttccccccactagagttttgaggttttttcttaaggtttttttttttttgaaaaagagagttacagacatgtagtgcattagtatagtttgattattaaaagattcaaacgctggcaaaaacgtgtatgttgaatatttaaactctcatttactgcttccccttcccagaagtatatgctcttaagttaaatgtgtcttttagttgattttaaaatactgcatgtgaacatagacaattatataaatataaacatctgtatataagatgatattgtacgtgttctctgaccttttccttacagaaagttccttggatcacaccacagtggttcgactttttgctttgggtaatttgttgtgtgagcaagagaggttctcagttgtctaagcagtcactgaacagtgaaaaaacacaatatcattttttttgctgtggactgtggaatcattttagaatgtcaccctcttttgaggcagttggcaggatttgcccggaaggatcaggatagggtctttgggtctgagtcctgcgtgacttccttttctgacagcctcagatgcagtcctagactcccgtgtcattgagcgctgtccataacatcttaccatgagtgtgctataaaaatacaacctcttcattgttaagccgtgttactgttgaggctttaaccctattgtatcccaaagcagaagcagaggtagatatttcaaagtaattggatttagtaattgaaatttcaaaagtaattgagagatgagagcgtttcctatttggaagacatcagctggattttattttatttttcccgaagttatttgcattctgtcttgttagctttagaaataagaacagggaaaacagaaaggagaacatgtagtggtataatgtagatcttaaaatacttcagagttctcattctttttttggtatggtactcaataggtattctagtcaaatgtaggctatgactttgtaaataatctctcttgaaaaaagggagccttcattgtgttcttggcagcctatcacgtggtgctcttgtgagtgtgggctccagcctacattgaccgtgaaccagagcagccctgttactaaagtcaatgcttgtaattctcttacagtcctcataccacagatttccttgcaatcatacttttttctttcattctcttttttacctgttttgttttcagtctcagctaaaattgaatatatataagtgtactaactctctataaagaagtctttttctaatctacatgccactatgaaaattgaaaataaaaacattatctgtattgtttaataaggatttattcattagttgtgcacattctttatttgttcatttggttttaaaatatcaatgctcttatttttacttgatgaaaggagagaaacttcttttaacgaatgtttttagaggcactaaaatccttgattaaaaacagtgttaaggatttgtatttcattgtgctttgggagaaatgtcttaagatttgtacacacgagtttgttttatctgtgtgactctaattaaagttaatcaaagtcacatggcttagcaaatcactgaagtttctttttggaggtttttattcattttagtaatttgatttgttgatttgctattaatcttttaaaagtaaaacatcaataacctaattttataaagtatcaggtgtcttttttttggcctactttacgttacttactctgtactttcaagcaggcacataaaggctcagtctgtttcagctctgtgcactgctgagcagtgtcttaccatgactgacctcctgattaagaggaagttagcacgtgagagccacattgagtctgctggccttagcttcatgtgctatgtgagagatgtggtcattttgtacacaggatgttataatgggatattgacattttacggatccagcatcctgtgtataaattaagctttctttttaagaagacattttacagttgtaaaattctcgcctatttgaattttgagatcttgatgaaacataatccctggagtgctcttccactgttgcagtgtaatctttccatatgatatctgatttagttggaagcaacttagtaattatgcatgcttaaaggaagcaacttaataaacaggattttagagaaacccagtcagaattgtaaaatggtactgctgaatcaattgcattacatagaattactgggttagatgtaggtttgagataagtgggcagacctgaggctcctgtaccaccaccattgtcaagagcatgtgaagatttgcctttttcaaagaaaaaaaaaaaaaaaaaaaaaggactccctttcccttggttcgttcaaaaatgattcaaaagtagccttctcaagtctggtggctgagggccaccagaaagtggagcgggccttggttctgacatgggcttagcatggtaggctaggtaaagtcagctctgtggaggtgggcacagtttgtcatgtggtcaggtggcatgcagaggacaaaaagatgcagctctgaacttgaggatttaagcaatcatctgggaaatcagcacagcatgtggctgaggaatcagattcaggagggaggtgaagactgtcaggtgcagcaggccccatgtgtgacctctgctgctttacatgtgaaatataggaaggggaaaaataactattgaaaatcatttctgttccttgtcagcttatacacatgtactattaaatagtcacagtttaaactacttattttcagttcactattttgtacacattgtcctatattggtattattgctagcatttctgcaattttttgagttagaatttagggtgacctctcaagaatattttgtcatactgattccatctacagatatacgttgtggtaggttctggttataaaagtgtaaatggtaacagctgccatttaccaaagatccacctgccagcctgcctgctttatagatgaggggattgaggcctgggaggttgaggaacttgcctcagctcctggagctgcgttggattcctgctctcattctgtcttccttgtaaagcgagaggggtgttctcctttggtttgtaaactctcttgctatttcacagcctctggtgtccagaagacacataaacagacaatggcaaccaaaccttctaaattttagaacacaggtttcctcaggggtctctgatctcttgatcattttcattttgcctggtggtttcaagacaaacttgatatagaaggtgatccttgagtcaaggcctgaaagatgaggaatcagcccccaataacttctggaatcgtgtgtcttcaggcttctggagaatgtgagagcaccaacaccaatattttgcacagcagcaggtcttatgtgggaggggcaagagtgaggaagagctatatgaaatgtgtattatttgtattagcttgtggattagtttgctgttgctgcataacacattgagtggcttaaaagaacacacatcgattatgtcagtttctggaggttaggagtccaggcatggcttagctgccatactctgcttggggtcgtagaggctgtaatccaggtgtcagccgggctgcattctcatctagaggcttgactggggaaggccgcctcagactgttggcagaatttatttcctggtggctgtagaattcatatctgcctgcttcttcaatgccaccagcagagagagaatctgtaacttctgggaaggcctggaccctcttttaaagggctcaccagattatgtcaagcccatccaggccactgttttaacttaatgtcatgtgattaaggaggggctttaattatatcggcaaagtctcttcctttgctatattttcttagttagatgccagtcacaggtcttacccgtactcaagaggagaggattacacagaagtgtggatacgaggggcataaatcccatggatttattttagaattctgccaactacaggttgtgtgttataattcataaaaatagcagtggtttctgttggtctgtttatgctgccatgacaaaatgccagacagaatttctccctctcagttctggaggctggcagtccgagatcaaggtgctggcaaggtagttttcattctgaggcctcttccctgggcttttaggtagctgccacctctctgtgtgcccacatggtctttctgagcatgtgcagggggagagagaggatgcaagagcctgtgcatgcctgtaccagaagcctggtctctcttcttataaggacagcagtcctgtcagattagaacccatgctcatggcctcttttaaccttcattacctcttcatagacgctagtcccaaatacaatcacattggacattagggttttgatgtaggaattttggtgggggacacaattcattctgtagcaggctaagaaagtcttctagttacattctgcttatctcaagggatatcagttggggtatatatatagatgccttccccaaaaagcatcatgacccttatattataatatgaccttgggcaaattacctactctaggagatgatttccttcaactaaaatagtggttggcaacattaactactttgcaggatttttgttcgcattggttgtgctgtgtgtaaatcacctatagtgtgccgagggcacaggaggtgctcattaaatgttgtctgttgttgctgtatttgtgccttgatatttctgcatctctctctctctcttatttgaaacagggtcttcctttgtcgctcaggctggtgtgtggtggcatgatcacagctcattgcagcctcaacctcccaggctcaagtgatcctctgtcctcagcctcatgagtagctgggactacaggcatgtgccaccacacctggctaatttttgtattttttggttttgctatgttgcccaggctgatttctttttttaattattatctaccttaaatgaagaattccccatgaatccttccatttcttcaagaaagaagtggttactctcccctgaactcataggacagtggcatttataagcctctgtcctatagtatttataagcttatttttgcagtgtattatttgtatacatcttttgtttcttctgtttcttaaagtcaaggaccttcttatacctctgcttatctttttcatagtgccttgtacattaatattttttcagtttaaacaatgttgaatgaacaaataaatgaatgggcatggcctctgaggtaatgtgtttcctctttcatctaaatctttgtttctcaatcctttctaactcatgccttcttttgaaaatgtaagtttccttacaccccttccacctttcagtatctcctcccaaaagaccaggcccgcagcccccatctcccttgatgggacaagctcgacttttcctacagatcctcaacagttgagattattttatcaagctccactttcatgtggtatgttataaaaaaaaaaaaaaaagctttcctcctttcttttccaaatagaaaattataatcctgggtgtgtgtgtgtgtgtgtgtgtgtgtgtgtgtgtatgtatatacatacgtatgtatatacatatatatacacatacgtatgtatatacatatatatacacatacgtatgtatatacatatatatatatacacatacgtatgtatatacatatatatatatatattttttttttttgagacggagtctcgcactgttgccaggctggagtgcagtgacaccatcttggctcactgcaacctctgccacccaggttcaagcaattctcctgactcagcctcccgagtagctacaactgtaggcgcatgctgccacgccctgctaattttttttttttttttgtattttagtagagatggggcttcaccatgttgcccaggctggtctcgaactcctgagctaggcaatctgcctgccttggcctcccaaagtgctaggattacaggcgcgagccattgcgctcaggctatcctgggtgtgtattttaaccggaccctccttgtaaccctcgttcttatttatgtagcattcattcattttcacccttgagaattactgctctaaacaatttctgatatactgtagaatcctgttacaggaagtagtgaagttagaattaagtgttcaggtgcggtgttgtgtctccactacctttgcacatgtgtaagagaatattctgtcttccctttatatgattctttttaaatgacagggttaaactgatatgcatttgaatttgtcgaaccctgttctccaaaatgattccagtttgtgtcacttaaggagtgaccctagacatatattaggctttcataagacctttctctccagagcttacagcgctttgcagacattaccttatcaatacttagggcatccttgtgagccaagcaagaactgggagctgttgctgttttttttgcagtggaatagcacgagaagttcaggaggggcctgccctccagaccccatctcaaggatgtgtgcgctggtcagaccctgccttcatgctcccgcgctgtggattcttcacggtagcctgcaccacgagagtgggtacagtgtgccagcaaacaaaatgcctttggtcacaagataatagagtaaatttacaaggtgatgtttatttttaaaggaatacgtaagaatcaaaattccatgtactgaaaggaatgtaaaatattaatacatctggagtggtggctcacgtctgtaattccagcactttgggaggctgaggtaggaggatcacttgagcccagtagttccagaccaacctgggcaacatggcaagaccccgtctctacaaaaaatacaacaaaacttagctgggcatggtggcacgcgcctatggtcctagctactatgggggctgaggtgggaggatcacttgagctgggtaagccatgattgccaccgcactacagtctgggtgacagagtgagaggccctgtctcaaaaacaaaagcaccaatgtaaagtacatctggtctccacaggggacttcttttaagttcaaggtgtcttatttaaaagaggctgtgtttggaattggattgcagcaaatgggggttgttttaagcctgcccgcctctatattctggaagttatattatgcctttgaaaacaaattggcttggcgtggtcaatcctgcttttagttaatgttgaggatgtgggaaatgcaaccatgagcttgcgggagagatggggtcccaagatttagggacctgtgtagaattgggcatctttctgagaaggcagattgatggtaaagaaaagtagaatctttggctagtttgatgtttatgtgggtgcacttgaaataggatgttgtaggcaatgccgtctcacttttgggaggataatactcaataactattaaaaatcccctttcatcccttgttctgtactcctcattttttttttaatacaacaaatgctttttagcctaatctccgttaattgtgatgacaggtttttaggtgaagacccatcaattatcaatagactattaaatattaaatagtgagcaagaaattcaatataaaagtgtgtatgtaacaataatattcaaatattgttgaaagactgcgtgcttacgtgttttgagtatacctaaagtggatatactttgtgtctccattgtaaattcctaaaatttctggtcatggcttttttattagaaagtctaagaaaagaagagtatgggaaattgaaatggctggcagtagacaagtagcatgccactgtaagatagtgctctttttatcttgatatagacatatccagacatgtgtatattttgtaacgtagggtaaaattttctactgttgagtttgtccatatacattctagttattattttaagatagtaaagatccttcgtgcgctgatgctagattggtatattaattcacttagcagaagggtattgatattgagtgtaattagcatgaaacactttgaacttttttaggctgaaaaggataatgtaacttctttagttttcctcctttctccctttctccccacacccatttttaaaataacagtgcttttcatactgtcagaatttcatgttgtgacaccctactcagaagttatgacagcagggtaatgacagcaactgcctcctgaaaatcaatcaggcaattaattttgtaaatgaaatgctgattatacaaagcttcacatgagaggcccagtgattaaaatcaatttaacaaattgtttcaggtgggacttgattaataatttgccataaatgctaaggatatatgaccagcataccttgttgttgctgttactatccagctatatataaaaatcgacaggtaagctctatctatctttatattagtgacactttgcttgtttgtttacctaagtaggcctgggtaacagtgaaaatggaatgcatttttacatttttatgtcatcctggttcatgttttcctgtgttctgctttaaaaaacattgcccaggcaggtttgagttcaaccaagttaagtaagttttttctatataggacattttagacttttctcatgttaatatatgttatgaatcttgaagaatggtgtgcgctttatacacatttaccattcttaattacaataacatctattcatatactttgggaaatactgtttttagaatactagaaatagtgacattatagtatggaaattaaaaaatgcctatgtttggagcattatagtttgaattcagaagtcacttggaataggagatggatgtctttccagcagtcacataccaaacatttattaaatgcctgttataagtcagacagcatatcgattttcataattttattacttatacttgacacagctaggaagacagtacaatattgtttagaaaaggatggcttggagagaggtaagggttaaaagatgcacttgggtttctttaattttgtttttttattaaagaaataatagcaataatggttgtccattgggtgtcagaagttggggctataaggaaaattagggtgaggaaaaaacatatctggccttaaagaacttactgtctgataaaggaggcagagataaacaatgagttgcagttgatggtgataaattgagtatctgttaaataagagagctgtggggaacggtggagccttgtgaaggcaggctgctggactcactggtatttccccaggctggaagtgcgtcttccgtttacagggcagccacagctgtgctgggtacagagtgttctagaaatgggtttggagttgtgtgctcaggcatcggcttggtggtgcataagagggctgtccaggtacagggcgggctgaggcctgataggtcgctgggcctgtcaccttgaggctaaccttgtttgtttgaatttgtccttctggagtttggatttttcggacccctttatgtcctctttcttacttttgatcttcaaggaagtttattgataagatttctgatcaaagaatggggcagaaaggagaagtgtctctaacagtccacattctttttgataccacagcataatcagaaggtctggcagggagggagaagggaagattctagaattatcgcacgttagaacaataaggaacttcatcccatttgccctttaattaaaaaaaaaaaaagaaaaaaaaaggccgggcatggtgccttacacctgtaattccagcactttgggaggctgaggtgggtggatcacctgaggtcaagagttcagaccagcctgggcaaaaccctgtctctactaaaaatacaaaaaaaaattagccaggcgtggtgggcaggagaatcacttgaatccgggaggtggagattgcagtgatctgagattgcatcactgcactccagcctgggcaacagagtgagagaatccgtatcaaaaaagcagcctgatgttgtgactcacacccataatcccagcactttgggaggctgaggcaggaggatcacttgagcccaggagtttgagaccagtctaggcaacatagcaagaccccatctctataaaaaaaattagccaggtgtagtagcacacgcttgtggtcccagctatgtgggaggctggggtgggaggatgggttgagcccaggagtttgaggctgtgtgagctgattgcaccactgcactccagcctgtgtgacagagcaggaccttgtctgactcttaaaaaaaaaaaccacacacacaaaacttttattttgaaataattttaaatttacagcaaagttgcaagaatagtgcagagaagtcccatgtaccttttattctgatgcattacatttttacattttgctacatttactttattattctgtctgttcatctatccatctgttcatccatcatttatttataatgcattttctcagaatcatttttgagagtaggttgtatacattccgcttctttactcctagatacttcagggtgtatttcctaggagcaagcatatgctcttacacacacctcagtgcagttatcactgtcaggaaacttagatttgattgcatactttaacctacagtctacattctaattttgtctgttgtcctaatagcatctatatagcaatcttctctccttcagtgtaagattctgtctggcctttatatgttgaatttagttgccctattttttttttttttttttttttttttagaatataagatttgaccatatattagtcatgttaacttgtttttctttaatgaagcacattacagtaagagtcaatatatgcttacacatagttacagctctgacaaattagatatctaatagggtcatatctctgaaaagcattttaaaaccaggggcaaatagcctgtgtatcagcatggcaagcaccctttgtcccaagataggtaagtcagttggtaattttcttatcttaactggcattttaatacaatttttaagttgtttatttaaaatattgataaaatagttggaaagaggcatggtagcaaccatagggattgctggggaaattagtaacttctctgtctttacgtagtgctctgatatgtgtttggaattgtttatccttgcaaatcacactaaacatcttttgaatggttgtctgagggaggtattattatttttacttgagaggtggggaaattgaggcttagagcacttcaataatttacttaacatttcatggctagtcagaagtaggagagagatgtgaacccaggtgtacctgatgacatacttttaggctctttccattttactggagatggcaaattactttttgcttgtgcaaattctgatagttgacacaactgcccgcaactctgcaggacaaaagattctgaggcttactggacttagagaaaataatgctaggattgattagcaatgtctgtcttctgcacattgatggaggagtagagggtttccatgcctcattgattattctggaattatacctccatataataatgatgataataaaatctatcctttttaaaaaaaaaaaacctgttatgtaccaagaacttgaatgtattatctccagttctgtaacagctctgaaatgatagtggtagtgttctttgtgtacagatccattaactgaggtgcaaggaagttaagtggtagctttcttcagtatcacagagctacaagtggtggggttaaaatttgacatagtctcacaaaagcttctttctcaatttgaatctgtatttgtatgggaaatataccatattatttctccttcttaaataagtgcttgctactaggctgtcagtagtgacacatggttatgaacaatactgcatacttagagatgtaaatgttagaaaatgttaaagccatgataaaagctttacaatttttttgggtagcaagagtaacaaatgtgaggaaaaatggaaatatattctattactattttggtattccttttagatctaatttactctcaaaataaacaatatatatagcctttggtttgttcataaaattattacatttgctaaattaaattgaaaagtgtagcttagtcagacagtaatttactcattgaattgacttacaagctgctgagctttgggggatgaagctaataataggttttgccaatttataaaaatcagggaaaaactagggaaccaaaatagtcttcctttctggacttattctgtagcacctggatgatagctataaatgggttcaatacttgtttttctcctcttccgtactcctgtttctctgggacagtctaggctgggggacagacattgatcaagtagtcacacagatgagcccactgttactctgagaggatcctgcccgggcctggagttcagggagggctcctctaaggacatgacgttggagctgagttctgcaggaggagaacagagctcattctaggtgaaagaatgacatatttgaaatgtgtggtttttctagagccctgtggaggccagcatggttggaggggagatttcctgctggcagagatggggggtcccacagattgacttggtaaggagctggctgtggtggagaggagaggaagggtcaggatgtgtcctggattctgacatgaatatctgggtggatggggtgtctttctctgaggtcagagagaggcggagaggagcctgtggatgtctgggcaggaatgctgtgcagagttctggggcttggaggaagcagccaagggaagcagcatttgggagacagaagcttggggaggtgatggaagccatggtctgggtgaacttgtgcaaagtgaagctttgtctgcagggaggggagactagaagggtctttacctcttttatctagtggtcatcaagaggcctacattctagttagagtcctgctgtttaagtggccatgtggtattgaggaagctgttcctttctcatgtcaacaaatgttaattatgccaggcattgtactaagtgctaggtatgcaaagatgaataagacaaaattttcaccttgaaattaacagtctgctggggagacaggaaaatatgtagattaaattattgagtggtttagctctgccttcaatttgctaatttgttaagagtaaaataaaagagatttaggaagttctttttatgtgataaatcctgtggtatctcatttaatccaccagcaacactgcgaggtgagtgtgaccgtattctgttgaatagcttaagcttacctagctaataagcagcacaggcaggattctcacccaggtttgtctgacttgaaaccccctgcctgctccgttataaccttttccccaaattatgtttctaaactttggatttattttatatattagaaaagatgtaggaatttgaagtggtcaagaggtggtcacctaaaggcaaatatggtattgtacttgcatagcaagagtagtgaaggaatgggaggtttcctgggaaccagtggaaaggtttctgtacggatctgcttccagaacgctgatgcttggatttaaataccagtctttatgaatagatttggtagtgagtccaaggctctgtctcccctcgcacctcttcagtgttttcattgatgaagacttgggtgaaatagtatgctgatttcattgatggttgatgtcaagctagaaaatgcagttactgtaatatgtcagatccaaatcaagatttgaaaaacaacctcatcctggtagaatggtgatcagaaataagcgaaatgcaaacaagcggagataaagaccaacttcttctactagggtcaactccccaagtgtctgataggagatggggaggtggggtttagtcagctgttggtggggatggggctgccaagagcgcagagctcttagactgtgttgtcagcagtgcaggttctagaaaaaggaagcaagaactgctcccccactccccccacaataccttttgtgttgagggggctgagaatgggtatatgtcacgcagaaaagagaaatagcttacagcgatcttcaaatattctgccaaaggaccaaagtaataccaatgggtataaatgacagggagcagacttttgttacataggaggaagaaattcataacattcattgtagatgctttgaaaggatttgtatgtacatcacttacggacccgtcaggctctctgcagttctaaggttctgagtttcattgctgaatctttgaatctttggtcaggctgtcttaagaattgtgataacgtgagaatatattaaagtgctttggaaatgcatggcatatgttgttattatttgataatgtaagtctgggatctttggatgggtttctagattagattccatgaactcctctgacactgtatgctaaattgagggttccatggttccacaaatacatatgttctctgcaccttgcttaagaaaaccaaaaccaagaccaaaaacacaggcagtggtcatctttctcagtcagttaggagtgttttgaggtctctcccccaacattgctaatgatgtcatggttagagggcaccgataatttcatggttcttagagttaataacaaaacaaccttttctgccttgtctaatatcttttttttttttcagtagagaaggggtttcaccatgttggccaggctgatcttgaactcctgacctcaagtgatctgcccgcctcagcctcccaaagtgctgagattacaggtgtgagctaccatgtgtggccagtcttgtctaatatcttagaatcccatttcttgatcctttctgtaccattggaaaatgtgacaaatattcctgtattgacaaaagaagaacttctgtgtgttgatacccacattcgaagttccaacgtgttagttcaagtcttaataagcaggcagtgttttgttgtgagttgaagtaaaacacatagtggttttaaatgcagggttgcatgttatcctccttcagtctgatgatcgtgtatagacacaccagaccagagatgggactgtggacccgagttgggagacttgactctggtctgagctctgctaccgtgagcctcctttgtgtcattgggcatgagagaatctctttggcgattacattctgcagtagtggtggcagtggtagctgagattcttggttctttctggcttagagaggagtaggcacttgttatgaaacaagggaagagtctttagtgcccacttttacttttgccgtaaacgggtttttatgccgttaggagaagaacctgaccagagtatgcattcagtattatcattgtctttacttgtgtcttctgcaggtgtgtacagcagctctgaagtgtgtcccacagtggcttctgggtggtgccactggcatgtggtggggaacctctgtggtgaggtggagtgggcgcccactgcccactgttctgtgtgtgccgtgaccaggcgggtgtgcgagggaggaagacaggctagacggccgtgttgcatccacctcctgttctccctttacagagagccagagtactgtttgtaatatgctcagggaaaaacagaggcattttgagctatatttagacaccatcacagaaaagtaaacacagattgcttcccgatatgacagcaactatctacaggccactgtggctgaccccgatccttatcgagcttgtttcacatggctgtgatctgtgtgcatcagtattgaagaaatggcacgttacctgacatgtcttctctatgcccgtgtgtagtccgctgtgttggtgtgttacggccgggccatggattctttacttttgcacagttgggctgttccattttttctcaatgagtaggtgggccctgggctccaggtgctgccatagcccctgtgacctctgagagcctttatagcgctgatgaatttaatgttcataataattgcaaggtgggttttatttctcctttagtgaatgagaaaactaagaaataaggtcacagtgtactcgaggtccctggtgggacagggctgtgaatccattctgaatccagagcccctacttccttgctgggcagtgccattcggtacacagctgcagacgtgaataaacaccccctgccctgtttgagcgagagaaatagaacagatttcaaaagttttctttagttactggtaagagaatgttgtttcccgaacaatggttcaaaagagggaagagttttctatcagctcttgtttaatccacatgtgtagaaatgattttagatcaacaagattcgatagttctttcggtgggttttctttgttgttgtttttttttttttttgtgaagtgtttttccaatttgcggttgaaggaattgggctgaaaaaagtagtaaaatatgatatgcataaagatgtatctaataaactatgttcttaatttgatatttaggagcaaatacaattagatatcttttactataaatgcatgtgtagggatactctgaaagcctgataacagagtatctaaatataaaaaggataaagtatatttaaagtatactaaaagtatataagcaagttgtcctttaacttggatcatcttgaaaaggacagttggattcccagcccagcctctgaaagcctatctgacatgtaatatagctgaattgtgctacccaatatgcttagaagaatctatatacaaacatttcttaaaaatagacaatgtatttcttccttagagagagagagaataactcctacttacatgtacatccaaaagtttactttgaataaggaggaggaaagtcttatcaagtaaaaaaattgcattaaaagccaagtaactaaaaccagactggttaggttaagagctctttgaaaatggtggtgtatatattgtggccttcacagcacttgtcttattttctggaattgaaactcaagctacagcagttgtggaatgccatctagaaatgaaaacatgctcggacaatctatttagagaagttgttgagggctgttttcgatgtggatgataaccctgatagagcataaactttcagtgagaaatgaaaatggtcatacccggatagatgttaaaaaaacataaaattggccaggcgcagcggctcacgcctgtaatcccagcactttgggaggtcgaggcaggcgaatcacttgaggtcaggagttcgagaccagccttgccaacaaggcaaaatcctgtctctacaaaaaatacaaaaataagctgggtgtggtggtatgtgcctgtaatcccagctacttgggaggctgagacatgagaatcacttgaacccgggaggtggaggttgcagtgagctgagattgtgccactgcactccagtctgggtgacagagcgagaccctgtctcagaaaacaaaacaaaacaaaaaacataaaattgcttcaggttagatgtgcgtatgagaagcagcttggcccttttgttttccagaagtcttagatttgatttttttttttttctttgagatggagtcttgctctgtcacccagggtggagtgtgcagtggcacgatcttggctcactgcaacctctgcctcacaggttcaagcagttctcctgcctcagccttctgagtagctgggattacaggtgcccgccaccatgcctggctaattttttgtattttagtggagacaggatttcaccgtgttgctcaggctggtcttgaactcctgagctcaggcaatccacctgcctcagcctcccgaagtgctgggattacaggcgtgagccgccgcacttggccaatttttagtttctttaagggactggtagtgagaagcaggagttgagaccctcagttgtacatttttaatgctcaaaaatagaggacacagcaggatggatttggactgtggatgaatatttaataatagaccataaggagaagttaaaattaaataatttgcactgtatgagtatctgtttttctatctgaagtctcattgaaagatatttgatgcattttgagaggttcagataatctgtgtatttaatgctttcgattttcagaaatctgagggttaagctaacatttttgacatggtgcaaattaactgaattttaagtaggactgtgagagttgatggcagtgatgagacagataatacaaaacaattttagtcactgataagatgaatttgctgcactgttatctatagcattaaaacatagacattccaatcattttcccatttaacatttctgctttaattaaggcagttttggtcgtgcactatttgaagtgaaataagtagacgtttcctgtgccctgggctgtctagattgaatgtgaagataggactgcctcagggccccgtattggaaattcagcctgaaatttgatttactcagcctctccataggtccttcattcacttggctgattttgaaatcaccaactcagccttgattttcatacttccataaaaagttttacctttttcaagaaaatctagaaaataatcacattttatttttatcaggcataaattctaatttaaataattatgagaaaatgaattcttagccctagattttagttttactacaaatatatcaacatacatgtttgtacacttaattatgaaggcggctcaggttatgtaaaatcagtatattgtttgggcaaacaaatgtactgtcgtttaatttctatcatgttaagtccaaacaatgtcttggctggtgaaagtagtaacagtttaaaattgtatcacatggtgaattttgagcagaaaagttgcttgtaggctgtggggcctggggcaaagcaccctctttcctcctgtgtcctccacagagcttcattcaggtgagatgggttcctcctggcacagtcctgtggatcccttgggactgagctcaggtatttcctataggaagcctttgttaaagcccatggcagacccagtgagacaccctcttctcaccttgccttggtgctttgtcccttcaggacatctgctgtgttgcactgtgacctgtttagtctgtctccttcagtgaatctccaggacatggaggctcgttcatccttctgcttccagtgttgggcacaacgcacatagtaggtgcttagtaaatgtgtggtgaatggattcaccaaatctttaaagtgaacaccagagtattgaggaaggcagagaaggggaaggacccgtgcagccttggagtgggagtgccagtggaagagaggactggcagttctcggggtctgtgctcctgccttccatcttcacctcccctccgtccctcctcttccagcctcagccctcacctctgcagcgagactgtccttgccgagcacagcagtggcctccttgtcaagtatagcagaagcctttacccttcacctgactgcattcctgggctgcatttggcacacctgtttcgttgctacacctgactcccttccctcctgtaagagcacactctccagagtgtctacattttctggccattcttccagcttgtctgtgggttcattttcccttttcccttaagcggtgatattctctaggattctgttcgctacccattgttttcctttcatatattcctcctaaataaagttcatgggttttattgcttcctattgattaattcatcaattaatgtgctgggtacactgttcaacttatgccctggagatataatagtgaataaaatagagaaaatccctgccctctgggagtggatgtcctctctgctgacttctctacctatttttccaggtcaggccttactccccaagctgcagctcattatgtctcttccttctgggcattttcacctggatttcatatcagagcctcaagtttcctatgtaaaccactgaaggctcccactcctggggatatggtgattggcttctccctctgcacactccatctcatttggctgctggcttccatcactcatttggtctccaaatcctgccgcatttcccttctaactgtgccttggagctgggcttgcttcctcccaccactgctgccagttcaggacctcagcctcacctgcctgccagggcaacctgacctgcttccagctgggtcaggtgcccaagggagcagtcctgtgttcatctgtcagaggcagcctgagcctgtagaatgccctgcagggctcacccatgttctggcttctgcctgcttcagcatcttcgtaaattcgtgcttcacgtggatccagatggtttttatttcctgatacacaccaggcagttcatctcccttgacccagtgccttgtgctgtttcttctgccctgtggtactgtacatgctgttccctcccaccttggacgtgttattcccctttatcctggtaattctttttttttttttttttttttttgagatggagtctagctctgtctctcaggctggagtggcacaatcttggctcactgcagcctccgcctcctgggttcaagcgattctcctgcctcagcctccggagtagctgggattataggcgtgcactaccatgcccagctgatttttgtatttttagtagagacggggtttcaccatgttggtcaggctggtctcaaattcctgacctcaactgatctgcccgtcttggcctcccaaagtgctgggattacaggcatgagtcaccatgcccggcctctttttttttttttttttcaagagacagggtcccactgtgttacccagactggagtggagtggtgtgatcatagctcactgcagcctcgaactcctggggtcaagtgatcttcttgccttagcctgaacagctcggactataggtgcctgccaccacgcctggctaagtttttaatttgttgtagagacagggtcttgtgatgttgccaggatggtcttgaatttaccctgctaattcttaagccttcctgaaagtccccatgtacttacctcagtgtgaacgcagcatctggcacacagttgggatcagtatgtggttttggaaggacagaggagggaaggaaggagctgctgggtgaatgctgcctgctactgtagcaccgggtgagggcctttctacctattgctttgttcctttgacgtcccaggacatgaagggctgaggctccacgcctagccctcctgtatgacctcggccctgaagcccagggcctgactcaccaaaccaaaaataaaattcaacatctacttgtgaactggttgtgtttggtaagatgctgacttacatggggagaggtgctgtgactcatagtctgagtgctcatccctacacactgctggtctctgaacaaaatctttaccctggacatatgcatgatctaaaatctatcttttcactttttaatgaacactcggttgcactaaggtttgatcaagacttgcagactcagttctaaaataaaatcattgttctaagaatactttgaaggcagaaaatgttaatcactcaataccctctgctcttattactagtaagctaaaaggaggtgggtgagcttaactatcatgctcttttcctgtacgcataatagaattttagatgcaaatgttttctctctgcttatggtccaaaatcgtttttagttttgtttagtctagagctctcttaattgttaaaaactcctaaaagtaaaaaataaaatttcttgtatccatctaggttttttctttaatgtcttgctggatgttttgtcaggtcattgtttttaatatttttaaaacttaaggatagttgtgttattaatgcatatgttgacataacacaaatttgtgcctttgtaataaagaatgaattaataaaccgacttcttttatgtcttcacagggcagcccaatggatccaatggtgatgaagagacctcagttgtatggcatgggcagtaaccctcattctcagcctcagcagagcagtccgtacccaggaggttcctatggccctccaggcccacagcggtatccaattggcatccagggtcggactcccggggccatggccggaatgcagtaccctcagcagcaggtttgtgctggtcccccgacccgctgcttttttgtaatagttttgtctttgccttttgctgtccacctaagattgatgttaaagagaattagggggcattgcacggattttctgctttaatttttattgtttctttaatcacaggtataattttttttttcttttaaagatggaaaggtgagcttcttaaagtggacagaatacctgtttggtagaagggcagcaggaccagctgtatttgataggtgcactgtgtcataaatttgcagcaggttataacagatgtaagctctgaagtgaacttggcattccaacatttttgtcagactgtgtcagattttgagctgtgaatagaccatcttaaggtgaattttcaagtcatttaaaggtcttttccatgaggatggcatcaagtttttaaaattgaaaaaaaaaaagtttagtctcccaaagttattttgctttcatttcttaaattatttcttctgtaccttttgaaaaaggtttctgtatttcatataagaggatttgatgtgcatctgttttgttaggtcttgatgggttttgtgtttttacttaaaaaagacttttcctgttcttaagagacccaacattttccttttttttctctggaatcaaatggagtcaccttagatgaccatttaccctctagcagtggtaaacctagtcttttggatacttgaaagaatacccctttatgctggctggagggaggatgaaatttggaaaagactaaattagattcaaacttgttagggtatttagttactaggagcaccagaaaggcttatttataaatcgccataccgtacctaagccgccagggagtgggtcaggctgatgctgctgcacgttttactgccccaggctggggcgtcccatggtgcggccgtcggtaacccacaacagggcttgacagtgctgtctcaggaaatgcttccatctgaccagacatctttcgttgaggggcaaaaattagatatgactactgttctctctgatgtggatatggagaatgattgatcatactttacatgatacatagctgtatattaacagttcatcagtaggttgcttctgagccttctcgtttatacactattcgatctgtattgtgatttattatttgtttcattattattgttattaatttattattgaagtttattttaattataatattgtgtaagtctatgttatagtagcatggcatggtggcaccctcctgtatttccagctattcgggaggctgaagtgggaggatcgcttgagcccaggagtttgagtccagcctaggcaatgtatcgagaccctaaaaaaaaaagaaataaaataagtcttttatttataaaataagaaataaaatgttgtctttcctctttatctttgctcccacttggatgattttgtttatgttaaggccattattggggaagatagaggtagctcagcctttgaatcctagttgcagattgaacaccctttgctgttgtcagagacctcacttctcaattattgaaggttacccactccgaattctagcagtcagttgcatacttaattgtacttttaattttttccacattattcctttttttccagcaatattttgctgcctagagtagaaatctttagttgtggctgctaattgtgagaaggaaataatttgtaaatgatgaaaagtaaggtggaagagttgcgattttctctccttcattttagttttagagcagcttcaccattagttgagaggaagacagcccaggcagctggctgctcaagtccccatcgcactctgttgctgattttatgtgggagctaatagttgtggatggtgctttggccacaggaagagagcagaggtgggaaggtagtaagaagtagtgggaccggcagagagaagtggatgctcgctgctcttgggctccccactttgcttttcagcatgtttccctgatgtgagattaaaaagtcagtttcaaaagatgctgttcacggcaagcagccggatctccctggtctctgaaggagttaagtctcactagaagttctagatgttggcttagtttccagtcccaaagtgggagtcaaacaaatggagagggtgtgtgaagaatgattacctaggaaatgtttttaattattttcttttctaaatgtgtaaagctaaaagtagaggacatacacagatatatagagtaatctcaattttcttagcttcttccatttatttaatccctgtgactcttatacactttttaaatccaatgactcttagatttatttgaagggacaaattgatgtaggttgcccatcaagtatttcagcaaatttttaattaagattttagattggatattttactgctaaccaaaagaaatacccaattctaattaagcacagatctttctgataatgaaaggaaaatagtatatctggtaagaaattgaatatcctggctgcagaagtgtggaaactttcataatgagttaatcaaagtcatgggtctaaataatctgtattgcctttttaccttttcatttagttaaatacagctttgaaatatagtatcttgttttaaaatttaaaaggctaaaaataacagaatgcacttttgaatgtgtataacattttaaagaagacatacagcttttataataccaaggtcatgtgaacagttcttaatttttgaaatggaaaaaaatagtgaagatttagagcaaaggttattagagcatatacattcattttgttagcttgagtctgtgttctttggggaggaattttcagtgaattgctttgtttctgcattttggataattataaatttgttcacaaacagggtcctggcactgtgattggctgctggtcccatccatcttcccctaggattaatgtaattggctaagcattgttgtagttgtggctaataatgttcttcagggaaaaagttgaaagataattatgacattgagtatttattgagtggacatcaccacctaggcatgactttgctttggatggcttccagaacgttctgtgtttggtttgtgaacctctaatgagctgaatccagttcatttaatattgctcgtatatttctgcacaggattaaaatgcaggaattcaagtttgtaaattgagttgcccacttaccagctgagtggtaagttgtctttggctcaggggtcacagtttgattcctggctggcgttctgctcctgtgatatgaattttaaatgagtattttgttagaaagaactgcagtgctgatgtgaaatttaacatggagaggagtatcactgtttattttttgtctctgagagtctgaaggaactggccactgactgtgtttgattttagtattaccctggtgatctttgatttgtatggtgataattttgtttttgagatatactcgtgactggatctttgaagcatgacgtgataatagtacatcattttagtctttattaactggaactagatttgtggtctttcacttgccagttctcccacatcatcaggcaaatacatggctaaacagattagttttgcacggtgccctaaaaactagtctacttgggtttttgttgagttcaggggggaaatgaattttctatgcctctgtggagaatattctgcctccaggcttctggaattcagacctggggttggttaacagaagtacattggttgatttcatctattagacagctacacagaagaggcataatttttaaggttactagaatctgactctgagtttttcagattaaaaaaaaaacaaaccttaaagacaccaagatattctttgctggatcaggaatgcaggttttgtttcatttttcttatccttcgtgatcataaatgtacacctaggcctttaccaacttgttttaaataagattttaatataaaacggcacccaggagaaatagcttacagaagctgagttatttatttgtgtcaagcagatttcaattatgtagactgagatttttcctgagtttttttttgtaattgggttgatattttaactattcttgcaggtgtttgataatatgatgcctgttggaattataaaacagggcaaaaggaaaaaaagcaaaatgagagattgaagttcatgagtgcttttatgatgggaaaacatgacttttttagtttttaaaggcatacatgtattgcgaagaactttatagcaggaacatagaatatgatcattgttttgaaatagaaaatggcaaaattaaatataaactaattatttttgttaaggtgattcatctgaacttattacttcatattgaagtaaaaacaattcaaaacaggtttccttgaagagggcttgaaaaagatttgtattctaattttgctgcatgttttttgagtaaaatatttatttcagaacataagcattttatttggtaccctcttaacagccaaaacacttcttccaatgcaaatgtttattttggcagcagatgtttctaaaaaggagacaaacattacaattgtttggctaaaataaatgtttcctttggggttattaaggcagccaggcaatttctagggtttccacctgtgttaatttatattgttgatctattctggaaaaaaatgtgtttcttttaaatgtaattaaagccacgttttgatatagtttgcatgagagctctgaaaagtaaggatgaatggggagaggaagactggtttaagacttaaaaattccagagtttttcatcatgaaatgtttattatgattcaatctttgaatcctaaatatgaatccaatagtcagggcttaatttttgttttatttaaaaaagagcctagacttcctatgtttgcgactgtgatggtgtgtccaggatgagaaaggatagataacttgactaagtataatggagaggaatgggtgcctggtgcctgttttacattcagactcttaattttttgagtctctatatttacttaaagatgcccattcatatctgtgtgcacatgtacgctcccacatgtgtgtaaaaaacagaacattcatgtgacaatggcattcttgtgtaatgaaacgtgtatatgtatattaatttatatgttaaacatatttgtagatatacatatataaacacacaaatgaaatgaaggtgaacattttggccagtaaaataatgaaatgctatgaaatttcactatgttgtttacagcattttcatacattcgtgttctgtactgagacttggagccgagctgatttgcttgtacacctgaaatgtttggaggcccttcagcagattgcagatttttataaataatggcctttcgttggccacattttgtcatggtttcctcagttgttcttcagcagtgaacatgaaggtatttaaggtttaccagcaaaatacatttatacctcacatttctgcttccaagtagatagcagatgctactggctgtgatgccaaagctccctgtagatggagttttgtactaagaaaatatttttgggccgggcgcggtggctcacgcctgtaatcccagcacttggggaggctgaggtgggcggatcacgaggtcaggagatagatagagaccatcctgactaacacagtgaaaccttgtctctactaaaaaaatacaaaaaaattagccggcgtggtggcgggcgcctgtagtcccagctcctcgggaagctgaggcaggagtatggtgtgaacccgggaggcggagcttgcagtgagccgagatcttgccactgcactccagcctgggtgacagagggagactctgtcacaaaaaaaaaaaaaaaaagaaaatatttttgaaaagatttgtaaattcctataatacctaactggttttgtgtactttttatattgtatttgggtttaaacatatttgaattgtgacattcttggaatgatatgttagaagagatcatattttaagttaaataaagatttttaaatctttagcctttttccgaaaagtgagagaagatcagattttacctgaaagtttaatgagaaaatgtgagatgatttcattttaatatggaaagctgcttttatattaggatgtttatattgatacatttattttttatctgtacatttacattattctcgattttctaagcttatatacagtatatagcgcctagtactctgctggtagtttatactgttttgtcatgtacacatgagttccactatgtattttacatatagactttcaacctaaaatatctgtaaggttttctattttacttttgagatgtaaatcttaaatgtatgttttatttttattttttagagacaaggtcttgctctgttgcccgggctggagtgcagtggcatgaacatggctcactgcggccttgacctcctgggctcaaacaatcctcccacctcagcctcccaagcagttgggactacagacatgtgccaccatgcccagctaatttttaaatttttttgtagagacgaggtctcaccatgttgcccaggttggtctcgaacaagtgtgtgttttaggtagcactgaatgagtatattttaaataagtgtgatttatttgctttcaccaaagaaacattaagcatggtatttatgttaaaacgttaataattcaaataaaggtaacagtcgacgtcagtaaaatgaaccaaccatatcccttcagcgctccttggaaaacaaacactgaacaacaacggaaatcccacaagataaatggaaagttaaagcgattaagtgacgtatcttagacaagtggttctcaaactttgctgaatgttagagtctcccggggcattaagaaaatccccccacggatgcccaaggatgcccatatcaatgacacctgactgtgaaggccctaatctcccgtgactgccctgtgagtcagggtattagagggaggctacgtgggcaagcgggggcagctcacaccttctggagacttggtagtgatgctggttcttggcccactcggtgaatcagaaactcaccactgacccaaaggaatgaaatgggcccagaaccaggagctgggatggttgagtccttgcctgttaaagtctaatctgtgtgtgatactgggaaaatctggatctcactgtgctcctctgccagatgagggggttggactataagacctctcagcttggatttcccctttaaagtaatattaagtgaatgtcttttcatttcagtattagatttttgtttgtttgtttgacatggggtcctgctgtgtcacccaggatggagtgcagtggcacgatcacggctcactgcagccttgacctcctgggctcaggtgattctctcacctcagcctcctgagtagctgggactacaggtacatgccaccacacccagctaatttttaatatttttgtagagacagggttttgccatgtagcccaggctggttttgaacttcaggactcaagcgatccacttgccttggcctccaaagtgctaggattacaggcatgagccaccatacccagcctcagcattagattttaaagtcttgttatttcagcagtcttgtgaaatgtatgggttgatgcttgacaaattgtattaagataactactgacccacattctttttaaaagagaaagaggtgtttctttcttcttcaaagattagcaaattgttggtatcagtctaataaattattttctaattcttaattttattgttttttaaatgaatgtattctcatgtaagtctttgttctgcaagaacctggtatgtgttagatgtgtagagtgcagtctgtcctttttgataagtagaaaatcttaaggttgacattcttggaatcacaaaaggaagcaaagagagatctagcaattactcatttttaagacattgctactttctaagtagttctgaaaacaagtatatattgaacaacattgggacagattatataaagtgaagtccggatggaaacacgtttcaagatttatgttctgtgcattaccttaactctttaactctcatgaggtaggctagatggctttgtttttgtattttaaaaaggttttttttctaaaggtaaaaagtttttcttttatgttaatagccagccaatagttaaattcttaatggcaaaaaattctttatggcagtttgattatttttacatgtaataaatttattaaagctatttgcccttattataattttgaaaaggaactttaaaagttaaatctgtagttgtgaatgaaattaagaaaactcttaagctgagagggtgcagaggaagaagatgggtgggagcatgtgaggcaagtaggggattataaagaagcagcagctttataatctggctctcctccgcagagccagagagccttgcttaatccaggcttcctcaggcctcgagagcaactctgcagttggactcaagtttagaaatgtttgggacgtcctggatttgagatctgaatgtgggtagtgtgcgtgtataacacaaacatcccttgcctgcttaaatagccccaatccaaaattttggtcactagataaacagcaggagttacccagcttcccaattcttatggagaagtgtgtttaatttagaaagcagaccatattccaaagaatgagccaaattcatctccctttattgatattgacttggtaagagcatgcttattttattttattttattttttttaaataactaccaagcaaaccaaccagtagaattggctcttcagggttagtcaaaggcaaggatccaagtcaagatctataaaacaccaaacattcagaaacaaagtcagactaatgttaatagcaaaaatacgcaggtattagaattaaaatgcaaaaacctgtcattgctgaggtaattaagttttacttaatggtcctgagacatggtataaccagcctcacttggatagttgtagtagctagtcctcaagagagctggagacaaacgtcttttggaagaaagcttcagtctgagatgcaccacagaaaagacagctgtgcagggatggttttccagcctgagctgccaacgatagcgagagcgtacctgaaagcaagggctcttaaaacgctctaagtcaccgaagcctgtcggtgggaatgggaggatgggggagggatagcattaggagaaatacctaatgtaaatgatgagttgatgggtgcagcaaaccaacatggcacatgtatacctatgtaacaaacctgcatgttgtacacaggtaccctagaacttaaagtataataataataataataataataataataaacaaaaaaaaccgctctaagtaaggattagatgtttctttataatcagtatcataatcattgtttccaaagagaactgggaaaaggtaaagcccagaataattattggcctatgggatctgtgacctcagatactctcttaaaagggtcagccaacaaggaggcttccctttttttcaattagtatattaccttgagatttccagtaggatcttcaggcatcccaatagtcattttccagacatcttaaggatttacatctctggaggttctcctcagtgtcctgggcttcatggagaaatagggcctgccttcttttcttcctacttgtgggtcctgtgccattcgttaggggtcatggagatgacaaggtcttactcttcagtaattggccaaaatttgatggttagtgtcttagtttcttttctgttgctgtaaaaaaaatcacagactgggtaatttataaagaaaggaaatttatttcttatagttctgaaggctgagaagttcaaaggcatggtgttggcctctggtgagggccttttgctgcttcacaacgtggtggaaggcatcacagggtgagagggtagtagcgtgctggctcagatctctcttcctcttcttataaagccttgagtcccattgtagggaacctcattctgatgaccttatctaattaattcctgaagtccctacctccagtcaacatatgaatttggagattaaattttcaacacatgaaatttaggggatacattcaaatcactgagcagttggggagaggaggaaagactagaatccccttcagctgccaggaagagctaatctctttctcccctagtgtctctggctgagttctcacccattcttcttcctccttggcgtcaaaataaaaggatgggaagagtgataacttagtcacatcactggcccttagtcttcatggcatctgatgtatcacagcacacttccaggaatggcggttaaggggtgcttcactgcacatacgcagcaggccgtgagagtgataagcacacagtggagagtgagacatgaggctccaggagggattccagctctgaccaggaaatcaccactgctgctgaaagccaccaaggtctggcaaggagcatcatgcagtgtgcttacttccaaatcaaactctgctatgatctaacaaagaatttaagtcacgtgaatgcacgcaggctgcaagagaggctgcgaatttgagttcggatttctaaatttcggaggcagaactttgtggttgttaactctttgtagggaacacagaattgttctcgacagttccaaagtttttcttgtgtagaaatttccctcttcagtgtcgcctcctgtagttttcctgtctcaatacctggtagcttcttccttcccaccgtctgggccacaacccctcctctgtttctcagcctttaaatctttttcttggcttttctcagcctttttcatctgttctgacctttgcgtttccttttcctcctgctgggaagtcttgcagggcttgctatctgagttccttgagacatttctctgacttaagtaaaattgcacactcccactgcctcctgccctgttctgttttctccagctctcttatcccctcctgaacctcacttgtctgatcctcccgttagaacatatggcctaggccggcagggactgttttccacgggtgtggacccatcatctagagccgtacatggcatttcacaaacatttccaaactactaatgaagaagttgccgaatcctagactctggccagtgaaatctgtccagcttgatgcaaaaatgtctgtgtgctttagccgtgttatctgccacccatggttcgctccgagattaggctcattctccaaagctttcatagttttcactagaatcccggtgcccaggtgctctgagaacaaagcctgcagacagctatggggctgtgtttttaatgctgcttttagattcctaaggaagttttgatgcctgagagattgttctagctgagtggttttctgtcttgctgatttcagtgtgtgtcatgtccggggtctgtgtttcttcctctctgattctaaccccattgagtaaattggagatggctgctactctgctctaaggcccattatgtctcagaatgatcccttgcactgggtgtaatacctcggtctggagaaggttgagttggatttggtgtacctgtgatgggagctaggttcttcatcccaacaccagtcattcaacagtgcttactgaagaaagtccccaagtagttaggatgccgtacatacaaaacagatgtttttctgttagggatttgctgctggagggaagagagttctaccacatgtggtggaagaacagggcctggaagatgggctttgagcctctgtagtgagagcacagttcacatccatgtttgtgctgggatcacggaaagggcttttgatggcattttagttctctgtcgctgatcatttggacccagacttgattttcacagtgctttatgggggctgctgccattatgcatacactgcatcgtagcccatttccaaagcagaggtcatggctacggctggaatgagagttgcacctcggagtagaggaatgaaatttaggttgaattcttaaaaatcatccctgtgtgctttattctagttgagaatctttgatagacatataattttgatgatgatgatgacaggaatctagtgccttcatgtaaactgtcaccatcacaattgtctcctctctggacccaatttcttatttgtaaatatgagaagttgcctctggatgacagtaacaataacagcaatctctgtgccaggtcttatgctaagtacttttacatggatgttctcctttaatccctgccatgtttctatttatctccattttatgaatagtaatagtagctcatgtttattgagggcttactctgggtcaggcacttacttgttttgcttgttttatatggattaactcacccagtcctcataacagcctctgagacaggcattgttatatagtcatcctcattttacaaatgaggaggctaaggggaggggttactcaggctgttcaaatttacatgcctactaagtgctataacaagcatttcagttccttagcgcctgaactctgggcgcacgctagcactgttttatgattctggtaaagctggaatccttgtaactgacactggagttcctttgagtttttaaataataagactgattataattaaagtagcctcattttgacattgaatattcgtttcacgtaaagtcttttgtgacctttaacaatttgaaaattgaatgttacctactacgtctatcacacttagaggaatttttttgaggggaaattcacataacataaaattaaccacttaaaaatgtacagttcaataatgtttactgcagtaatagtgttgtacaaccacctcctctgtctagttccaacattttcaccacccccagatgagacccctggattcattacgtagttactctctgttgtccctcttccccccaggcaactgctaacctgccttctaccgctggatttacctgtttttgatgcttcatgtaaatagaatgatataatatgtgaccttttgtgtctggcttttttcagttagcatactgttttcaaggttcatctcttgtggcacgttccagcacttcattcctttctatggcttaataatctgttggatatatgcatcacattttgtttatccattcatccattgatagacatttgggttgtttccaccttttagcaattgtaaatagtgctgttatgaacatttgtgtacaggtatttgtttgaatacttactttcaattattttgagtatatacctaggagtagaattgctggatcatgtggtaattctatatgttaactttttaaggaagtgccaaaccattttccatagtggctgtaccattttacactagaaacaggattttatcattggtctgttatttactgagactcttaagtgccagggaatcttgccaaacccttttcatatatcatttcctataattctcgccaaatccatgaggtaagtaatactactcactttgccagtggggaaacagaggttaggtagcttgcccaagctgatacaaactctaagtagagaattctgcctttctattagatagtagccttaaagatcctccagaccagccttgctgtgtgtgcaacacattccactggtgttaggcaaggtcattttgggtggcacatagacacagcattacataacctggagttctagagtagggtagttgttctctcattggtgttagtacgcggtagcacccttccaacacttcatagtgcctcccaccccatttcctttttctgaagaacaggcctgtgtctataccttgggcagcatcaatatctggttagaatgtaaccattattgtattgtcttcatggtattcattttttctggtaatcttctgtttatgacgagtagtattattttatatatatggtagtatgcaaagttttaaaatacaatttttaaattaaaaagtgtttcactggaaagaaaaacagttcatgctgtaagttaagcttacttactttgagtttaactcagcacatgtattttcaatgtctacagttgttcagtcctgtactagtcatggggaaataccaagacagccgtaactggggctttgctccagaggaccacggcagggacactctgcaaagagatatgctgagtagtgcgcacaggtagggatgtttaccctggggctatggtaacaccgaggggcacacctgggctgggataaggacaggaatgtagggggggtgttaggctgtatatgtgaatccagactgattctaataataatatgtatttactaaattttaaaaattgatattttgcagttagataaatgccattatctcatgtgtccattgctatccatagctattgttttggtcgaataaattgagagaatattattaaggtctttgacagtttgctcacttagttgtcatcagatgtttactggtagccctaagtgggtgaactcaaagtacatcatgggagcagacacgtaccaggtacttggatgcagtgtgaggagtgctgggtcaagatctatggactatactctgggaacacctgaagctgcatggggtggggaataggtgcccctagacctggatcttgctgtaggagtttgctgggtctggggagagaggcatgtgttcttggggagtaggtagagtgtgcttttcaagttcaattagattgtaaaggggtctttgtgaattttacagaatttttcacattttcagtttacacatggttatgagcatagaatcaagctttctccccttcttgcttccaaattttcctttcatctttgttctgctttggtgcttcgatggatcagttcagaaagccacagggctgccgcttacaggctggctggatcttgtttgattttttgttttgttttgtttaagaagagaaactgtttcttcatacttggagcaagcgctcaggcttccagagtgaagaaaattcctactctgtctgtgtatccagagaggatggaagtgcagtatgtctctaaacattgttttgataagtagactttttaaaattggtatatgatttctattaaccttactttcttctgtatcagagtgcatcatgcaattatagcacctctatggcagttaagtttatatataaagaattaacattttgctttgcagtctacattgctggtgacttttgcctttggaaataggaacttgccaaaaatctaaagtaatgttcaggcaatatactcaacactctgagtgtttgttctggtgtgtttaacctggtgaaggatgatagggaaataagtaaagaagtgaagttttgaataaaaactgactgccttgccctgtatttccttttccctctatcatctttccatattataacttttggttaaatcaactttcagtgtttatgttaatgtaactataaaataactgtctgtagttgagtcatggactgcaagtatatttccttactgtacaactttctgttatccaggagttgataactgcccattattttacgttttaagaaatgtatacatcaccagtttatcctcaagctctgatagaacggtgcacttcctctcaagatggtggaacccattagttacttagactctgagtgaacaatttttcatgttcatggatgaccatcatcttttgaatagccttcccgtgtctggggagatgtccacatgtaaaaagctctgtctccgtaatttaggattcggaactcaattcacagcttcttcagccggggatgcattcaggtggcttaagttcttttaattagaccagccatactggacttttatttggaagtaagcactttgcatgttgttctttaaattttgtgtggctttcagcagcagtggtgatctcctggtcagagctggaatccctccgggagccacctgccgcattctgcattctgtactttattaccctcctggcccgctgcgcattcggagtaaagcatcccttaactgccattcttgaaattactttgacctcaaaccctgttttctgaattccatgtcttgtctttatgtaatcctcgttttagtagggttcatcctgtagtagctttgtaggaagggtgcaggagatgtgcgtgtctctgcttgtcagaaaggtggccttaatgggtggattggctgagtgtagaattctagattggatataattttccctcaaaaactgttgttcccccactgtcctctgagcttctagcatgtctgttgagaagtccagggccccttctttggtatgtcactgattgtttttctctctggagactttagaaacttgatctccttgatttctaaaatgtggatgaactttggagttggtattttccatccattttgctagactcattcagtattaaacttggtgctatttttttcttcgttaggggagggtattattcctttgataattaccatatctttatttcatttgttcttactatctatgaaccttattagttgggtgttataagtcctggattaattctttaatttttgaaactttttttctatcctcctttcatctgattgctttttttgttgtagttcctggcagatgtttgttctgtttttgtagtttcactttccatgaacttgttttgttcaccaaatttttcttttttataccatcttactcttatttcgtggctacaatggtttatcttgccgacgacaatgttgggattctttttgaagggctcctctgcagtgttcctggtccatatttcctttcagcccttcacctatacggtctttctggttggaggctattttttttgtttgtttgtttgtttgtttttgagacagagtctcactctgtcacccaggctgcagtacagtggcacaatctccgctcactgcaacctccgcctcctgggttcaagtgattcttctgcctcagcctcctgagtagctgggactacaggtgtgcaccaccacacctggctaatattttttttttttttgtatttttagtggagacggggtttcaccatgttggccaggctggtctcaaactcctgacctcgtgaaccacccgcctcggcctcccaaagtgctgggattacaggctgagccaccgcgcctggccagaggccttcttgaggtgtctggtggtccttcgctttctgcacatctgtaacagccagttctgagaaccgatcggcacgttgtgtgtgtggacggggctgcggtggtggggagaggattgggccatcttgttggcagaccctaacatgctgctatctccccctccccagtaactaactcatcgttgactctcagaggagaagtcagggtgtctggagagctggaggctgactgggggacgggcctgttacgtgttttaactgagtccccgttttccatggactcgcctgctgtggcccctccagatggcaagtcctcttgacttcctacaggacaggtggggattgggaagggggatctctgaattgctccctacagattgtttacccagccccccgccaccctctgattcctgtctttggggttctgcactttaattagcttgcttcttatcctgtcacctagaacagattaaaactttaattatcacttgtctttctgcttttctccttccaaaatttttttgacctttcttatctgttaccatctcacctcatgttttctttgcccttgtggtatttgtttttatttctttactgtcattttaatggggtcccatggaagagtagagagaaacatgagcatttaatctgtctgtttaccagaaacctctgcaaaggcatctttaataagcagtttttttttttaaaccaacctgttttctaataggttttaatactgtgctatctggtaatgtgccagagttttcagtgtctcaaggaattggtagactaagaataaacctaagaataaatgaattaaacagcacaactggagcgtctctggcagggaacctggcctgaggaggccatgtaagggtggggtggcctttgtttagattcgccaggaaaagcttcagggaactcaggaagtgctgctcaggggaaagggtctcccagctgtgtttaggacccagcgaatgggagatctgaagtgggaaggccggccaggctctcccaccatccagaggcaaaatgaggtctgggtctgtagagaacatccccagtgaagggtaagagaggagagtccagctgagatagacgatgggaaggaaagagagttttggaggtttcttgcagatgagagcagatatattttaatgaggatgaagatgatcctagtgttgtaaatgttaaggatatcttgaatgtgtttacatttggtagttattaacacacgtctgcaggtaaacatgatttttctggttatcctttgcctttaggagagaaaaagaggcaagttaagtaaagtattttaaggttatatttagttcgaaaagaaatttctgactgtagacccggctctctgcagatgtggcttgctctccaggagtcacagaacccaactcgacctcctccctggaagcccaccagagaatccaataaataaaacagtcagagcaagggtgttgtaattgagaccccacctacctggccttccccttgccctgtcactggacaggtgatactaagcattcatatttagaatcgtgatggagactttgccagtcttcagtcctcaaggaaagatgcagtggtgctcatttaaggcagaaaatataactaatgtctgtgtttcagtgtaatttttaacaataaagaatgaaacgggaagaaatttccgattaatacttatgaacccagaaaatgaagttagtcattgtagcataatccttagctcctcagccttcagttgtactgttgctgtatttgagctttattgaagagaacagcttcacagtatctgtatgtgtggcccagtgccaagaccagtgtgaaactaaaaacaacaacagcaaactgttagagtaattataacaaaagtcaagtctgtagccttatgtgtcaggaataaagaataagagttcagtttatttggccagtgtttggtgttcacattgctgtttatgtaactctacatatggtctttcaaagtgatcgtgcacttccaaaatgaagtatctacccacttttatcagctttcccaaatgttatcttttaatgtcttcatcacgattagaacacccattagtaattaggataactcaggaaaaggatcttccatgtggaccaccatcctggctggaggttgttattcttctctgtgcatttttggtgccctggatttggcctgatcctcaggcccctttaagttaaaaatacccggtgtgtggtctgccagctggcccaaggccaggctttttatagccttgtctggcctgggaatggagcttagcatgaggggaggtgccggggggccttctctggcttggtagaccagaagtgtggggaggccctgctgcctcgctaagtcttagctctgtcatcataaataaaagacgagtcatctgatggcagtccctttcttctctgatatcttttggtaaaatatttgttacaataaccaaggagacaactttgagtaaatttcccattatttttgaagcctgttgccccttctgccagggagaaacttcaccgcctgggtccatatactttcactaattaactgagcaccaggttcctggagaaacatatttattaaatgtcaaaaatttggggacatttagtcttcatttttggtcttctgtgtccagtggcatttttcctaaattatgtccagcatttccttgagattatgtatgctattttttattctaaattgttgcctcgattcttctgaaggtactcatgtgttaccagggttcttccctctcctcccctgggagtacttagaaaaccatttttgtctcccttccttcatgccctcttccctggaagagttttatatactaaatcatagggttaaagtaataaatgccattgataccttgctttgttttgttattaaacattggtaaggaatttggtaaagtgagggataatgttacagaattgtcattacaaataattttcaggctataccccacagtcagccaacatgtgggacccgctgctaagacttaaaatattaaatagcagaatgttaattaattcatagagagaagcatctgcatttacgtagtctaaaagagtcaaaatttaaacacctctttgtgtaaatcgttacagtctttgcatgtttttctgtcccagagagcagacaatcacattcattttctccttcttttcttgttcattactagatggaaggggcaaaagaagaaaaagacaaatatttgggtgcttttctgtgctggggaggatagcttttttggttttcttttgtttttaaagcccttaaggaccgtagttggtaagccaattgtcacagtttgggtggaccctaaggaggggaagccgtgtcattggccctgacactgattattgaaggacaattgttcactttctctctcggattaaaaatgcatgaaagcacctttttgacaccgggctttctgaaacccagtgctgtctttttttgtaatactcctgtggatgtttttgcacaaagtggcacctgttagagctggaagtgttcttgcacggctgtctttgatctagtagccctggacaactttaagcacatagttactagatgcaggcccgcccagccccgggagagcatatctggcttgcacgtatttaaggtgatgtgcagaagagaactggaccaattgacaggctgcactgtacacaattactgtgtttcccatttgaattatcacttcatttctgaaaatggaaaagatgggacggaatgataggaagttttgagaatgctacaatatatgattaaattggagactctttttgactggacaatatgaatctgtatttttattattgcattttgggtgattttggacgccagtattcttatttaggattgaattctcacatgaaattgtgtaaatatttttctttttgaggacctatttctaaaattaagcggcttttttgaatttgtattttgaattcctaattttgtaggctatgccacttttaagacataagtgcctaaaaggatgaaaagtaatagaaagtagaatggggaagtggaaacactggaatcaccccttgcactgaacgcatagtaatttttaatgatcacagagtggctcttcgttgtaattagtgtaatttctcaaacaagcatttaatgtataggcagtttaagcatttttttctttctgaaaatatgttagactaatattctttcagaatttcttctgggaagaaagaattgtctatttaaattttactaaggttaccttttgaagaccactaacctggttgaagcagttaaacttgctatccgttctttgaaaccacattgagtgagaaaattaaaaaggaaaatggcttaaatattttccccttgacaggagaaatgataagtatttactgtaaagtgtccagataatgtaaaggaatatgaaagacacaaaaattcccccatcatctttccactcacagataacaagtggttgtatgaagggaacgaggtgcttcattaatctttgaaccttgcgtatttgtcccgtatttattaacagcattgggcagtgtttttgaatgttctgtgtggttatattatttattaccgtgggggaatgagccaggtctggctctttgaacactgctaatttacatgaagaaaatgtccccaaggaggagacttaactagggaaagactcagttaccttggcctctctctgtgtgtgccagagcccccctgcaagcactaggggctgcttctagaaaggggacccagatcttaagacttcgaggaggaagataccctatttgttctccaagaccattcagtcgtgaagggttcaacttgttccgggttatttatttagcattctctattttctgctttgcttttgacactccaatgtttaattgtatatttaggaaataacaatgaagagtacgtttttaaaaagaagaatgttttctggaagggatttccccccacttttggacagtgagttagactccttctgaagcctctggatctaggttattacagggtttgtcttcttgaagctggaactgtccaactgttgtgctatttcagacctggcctgtctttcactttcaagctccagaaataatttatagctgtagggtgtcaggagtgggtttgaactgggcctgcccaacgtaacatggaattgtgcacagattgttaaaattactatttctgcattcaaatgactaagtacagtaaactttttactggcacagttaatttatttgaatatttattggtcgagtgcttcacgtagaagactaacataatgaaaaagcccagcacatactcagagctgatttggctttttaaaagattctaggcttgaatatagctagctaaatggtctttagcaaattgactggcagtaaattgatcctgtggactgtggcttgaatcagcctctcattctttaaaggtattatggagatattgttatctcagcgcaaggctggtctagaaaagggatgctttcagtacaaatacttgttacttacatatttccttcctaactgggtaaagttatatttctattctttacctctcgcaagagcatatagggacttcgaatcagaatattttgttcaattgtaatagccttcacaaatttagtttgtttctgtgtttaagtctcttttgacttaaaaaaaaaaatttgaggccgggcgcagtggctcacacctgtaatcctagcacactgggaggccgaggtgggaggattgcctgaggccagaagtttgagaccagcctgggcagcataacgaaacctccctgtacagaaaaaatttttaaaattagcagggcgtggtgatgtgcacctgtagtctcaagcttgagcggttgaagtgggaggaccctttgagctcaggagtttgaggttacagtgagctgtgatgaggcaactgcactccagcctgggcaacagagcaagaagactctgtttccctgtctcttaaaaaaaaaaaaaaattaagagccagtgatttggaccttcattaattcagtgttttcattgacttactcatatgactattccaaccagaaggatgtaatttttccccctctgagcccccaattttaccattagcagatgtttttccaaaactaaccacaaggaagcatgtcaagactaactcagaggattatacagaggattaaactatgatttaattacaacagtgggctctctggctctattaatagctaatgacttgtattatattttcccgtgcctgtgaactctatgctattttagacctttcagatattagcgaccccagctacagctatcttacttactctgaaagtaggagcctctcgtttcatgtttagttttgttttataacttaatatttcttcctccttcacttaattgggagagcaaaaggtttactaaacaaacaggtttgaaaacccaaagcttccctcatgtcttggtgagcttgctgtgaagtggagtagcctgttataatgctgatagggataatggctggaagctttgtgcttccttaaggaatgtgctacatgcatcatttgcacatacagtgatcggtttgactggtggaattactaagaccatggtatagggtggtactttaaaatcttacagtgcttaaggactggattaggaattaggacttaagaattctaggtttaactctgtgctttaaatcttacttaacacattgggattatagtacttaagtatgcctgtattgaaatgtgttgtgagactagatgaaagtctatgtaaaaatgaatttgaaatatttggatatattctttaaaacaatcttattgtgtgtttttattcagagccctagagttgtcctgaggatgagtattttcccaccgcgggcatgaaaatggatcctaatggtagacccagtcctctagggtggtcagtttgaggcccaagcttcctttccagggaggcagtggcttaacctgggtcaccctgtaggagcagtagctggaggctgcaggacaggtgcttttttctcctcccacgtgtgctttttgtggtggaagagggggcaaggtgtagaaatgtctgactctgattcctccatctgccagcacagcttctcttgttctctgtggtctcacctttatggcacagtactctttcctatttgtctttgagctctgaggctcagccctaacctcgaagagatggcttctgcatctgtcagatgggtctcatagtattacctgcctccatacgttttgtttttagttttgttttaagataaggccttgttctgttgcccggactggagtacagtggcacgaccacggctcactgcagcctaggactcctgtgttcaagtgatcctcccacctcagcctcctgaggagctgggaccacaggcatgtaccaccatgctggctaatttcattttttgtggagatggggtctcactatgttgcccagtctggtctcgaactcctgggctccagtgatcccccactttggcttctcacagtgctgggattacaggtatgagccacactgtgcccagccctccataaatttttgtgaggttaaatgaggtgatacttgtaaataatttaatgttttcactcactaaaaaacaaactttttttggtgagaacgttatgaatgttttcataaaacatgtcgttcttcagggagttgtgaattgtgacattaacaatttccttttatcaaccaaagctagctactagtacctgttcctaccccctcctctttctgtttttctggcagggggcactaaggaacgaacggaattgccagggtgagctggaatgagcttgaaaggctgttttccttggttttgagtgattattgacttgtacttggggactttctgtggaattcagaaaattaaggtttcttatgacccataacctgaggcagttcaggaagccctttggggctgtgaagcaggggtaggggcttgtcctggagcagagcacggaagattcaggtgtctgcttggttcctccaggctctgggatgttaagcttattaaatagcctctctagacccagggaacatgttgggtcagctttcaaaattgacaaaattgtctcaggactgaggaagtgtggcctgttccacagtgcttacagcctgctgctgtaaaccgtcgcggtgtgcccccgcacccatcccggccatcctgccacgcggaattgtgtccacctctagataccagctaacactgtgctatttgcttgttgtgtttgaatatatagggcacagatgaaacagtgaaagatttaggaaggttttattgagagttcatttcttttgcaaaaatgttacagcacattaactgctgtaattaccataaataattaaaacaaaaatatgatcataagaataaatgaacaaaatgtgttaagttgtaacatgggcctctgttgattgttctggcctgtttacttccagtcaattactaggcagtttttgtccacttgggctgtttgataaggcttttgtgataaactatgagttcggggcagttggggttgggatgggtgcttatcatatatcatagaaggcatttcatgaagcataaaattcaaattgtaataatgtcactagtgtctaagttaacacgaagagatgaatgaacataggtcagagagatggggaatgatgtccacttttggaagagcaagtttgtaatactattatctaagttattcttaagaattagtaatagatttttaaggcgtatggatgatattatacatttaaagcccattagcgagcacattgttttttgattttcgaaagtttgggaattagtcagaatttacactgagagtagacttcagctacaaaaatattgtgtgcaagtgtaccttctgcacagggttccggtgtgtctgaggaaggcgtgtgctaacacagacgcgtgggatgctgacccacaaaacactgcaggcccgtccactttgtgtgtttcacgtggcggcagactacacgcttacctttattttcagtttcttttctgacaaaatatcacatatttcagtcagtgtttctgataaagtttgtaaaataatcattttataattatattaagatgaaatactaacaagctaaacaataagttagctatatgaaaactggttaaaataatgaaaccttaagttcatcaaagcagttcatcattttgaatggagccctaaattgtgtgtgtgtttctctgtctttgtgtgtgtgagtgtgcgtgcatgtgagtatctttttaaatgccacaactagagatgggaatatggaattcagtgatttacattggagaaattagctctggaatctaggaaccagatggctactcttagaggatcctcagggatgctatcatacttttatgaaaaagacaattgttgaaataccagtatgagaataaagattatagtggtttgttctctgttatcaaaattttcaggaaaaatgtggttatgtagcctacaattttcacgtattataattataactcttcgtgtggactggttgtagatggagggaagacagcaggctctggagactttctggacccctgcttctttgtagggttgttatgaggacaacatgtgttcctagatattgaggtcttagagcagtgcctggagtgaggtaaacaacataaactgatgtaggttgcctaacgttaactggagcgaacttactgcaggtgccatgtggaaagatgtgtgtatgtttcagcaaatacgttccactataccaatgcctagaaccatgtatgtgtgtgtgtatgtggtgaccatatagcctatgcttttcaggatgcattgaatgataacaacataaacacttaaaacctcccactgtgtgccatgtgctggtttttggcattttatgtacattaactcatcaacttcttaggaattctaagatgtatgtcctattaactcattttacagatgataaaactaaggcatggagagattaagtaacttccccaagtatttctagtggagaagccggggttgcatccagactctgaccttaaccactgctccatgctgcctccctgcatcaagcactgtgtcttattataaaaacacttgtgtatccacatgtgtgtgtctgtatatggcagagcccatttaatacatcctgtgtgtgtgggcatgcatatcctctctctctctctctctctctctctctcacacacacacacacacacacacacacacacacacacacacaaactgatgttggctttctaaaatgcttaagcctagtaaatctcaatgctgaaaaacccattcagtcatattttgttgaaactgtgacaaaatataaggggaagaaatttgggggaaaaactagaaaagtaatacatatctaaactggaccgttgggagcttgacgtgctggcaatctaagggtaggatgggctatctgacctcactcattcaccccaaggctggaagggtccagaagggcttgcagttggatttatgggagccgcatggaggagctgggattcaggaaaatttacatgtttgcttgaactgttaaccacaactagaacatcagtgtagtaagatttgtctgtttactgggtgcttttacatcagtaatctcctttgaacctcataatagttctcttaaatgacaccaaaagtattaccattttccagacgaggaaattgaggcttaggttaagtgacattcctaaagttacacagttttgaagtgtcaaaagctgaactttggttttctgataacaaaacaatattctttgattctgtcacccgcaatttcaagagagtgtcagtgccctggtcccctgctttgtggaggctgtacagagcccctgggaagctgaggtgccaggcatacccactgagaatgcaaggacaggtggctgttagaagcagaggccctggtgtgtccttggcctgggggctaacttctagtatggggtttcaagaagccctcttgctcaagtgtgaaggagggctttgttctgaagcttctatttgaattggaaactcagggtgttgttgagctaggaagggggctgaagagccatgaccaaggtgctggccacctactctggaactactttgattttttgtttcagtttggcttaaggaaacaaagaggcaaatagtgttctgttcctaactggtatagtagtcagttttgcattggaaatatacagtcatgttgcttaacaacagagatatgttccgagaaatgtgtcatcagacagtgtagtcattgtgtgaacaccatagagtgtactcacacaaacctagatggtatagcctgctgcacacctaggctatataacagagcctgatgctcctaggctgcaaacctgtgctgcatgtgactgtattgaatactctaggcaactggaacacagtggcaagtgtttgtgcgtcaacatattgaaacatagaaaagatacagtaaaaatacaacttaggtgtccatcagtgggatgaatggataaagaaaatgtggtacacagacagtagaatgttattcagccatagtagagaatgaaatcctgtcatttcgaacaacgtggatgaaactggaggacattatgttacgtgtaataagtcaggcacagagagacaaataatgcatgttctccctcatagatgggagctaaaaaaaaaaagtgaactcatggagctggatagaatgatgattaacagaggctggaaagtgtagtggagagatgggaggggggataaagaggggatggttaataggtacaagtatactgttagaaggaataagatgtagtgtttgatagcacagtagggcaactatagttaacaataatgtaatttcaaaatcactgaaagattggaactggaatgttcctaacacaaagaaatgacaaatgtttgaggtgatggatatattaattaccctgatttgatgattacacattgtatgcttgtatcaaaagatcacaagaggctgggctcggcagctcacacctgtaattctagcactttgggaggccacggtggtcagatcacttgaggtcaggagttcaagacgatcctggccaacatggtgaaaccctgcctctactaaaaagtatacaaaaattagccaggtgtggtggcgtgtgcctgtagttccagctactcaggaggctgaggcaggagaatcgcttggacccagaaggtggtggctggagtgagccaagatcccaccattgcactccagcctgggtaacacagtaagactctgtctcaaaacaaaaacaaaaacaaaaaacaaaccacacataccccatgaatatgtacaactgttacggattcataataattaaaagttaaaaaaaccgtaaaaatggttcacctgtgtagggcacttaactgtgcatggagcttgcaggactggaagttgcgctgagcgagtcagtgagtgagtagagggtgaatgtgaaggcctagggcattactgtacactactgtagacattatcaaccctatacacttagggtacactagattaattttttaaatgattatgctacaatatgatggtgattaccatgtcactgtttgataggaatttttcagtaattgtatgggaccactcttttttattttttgagacagagtcttgcctgtcgcccaggctggagtgcagtggccgcaatttcagctcactgcaacctccgcctcccgggttcacgccattttcctgcctcagcctcccaagtagctggggctacaggtgcccgccaccacgtgtatgggaccaccgttgtatatgtggtccatcatagaccgaaacactgttatgtggtacatgactgtaaatgaatcagaattgtctgatgattccttttctgtcatcccttacactactggtgccagtgccattaggatggctgcccatcgcctgagttttggccataaaggaatggagagcagggagagttcgccttcccttaagagttggcattttttgtttggtgccttacttgatgtttagattttagttctttaaaaaaaaaaattctagtgtttacaggtgtgctgtagtgcacctgtgtaaaggaaacttaaagttgaattattttataatttatacaccagccttttatacagagcaatgcttatggcagcttctctctctgtgttaactggtattaaagcttttctagattaaaagccgtaggttgcaaaacatggttttttgcatgtgcagttatttctttaccactgagttgtccttccaagcctggtctaaatgtgcttgaaaatcaccatctgctccctgcagtttggagagggcacagaaagactaaggtgaaaagctgtcacttctaatgttttcattcagactttcacacccttcttgtctagttacataattgtatgcagcaggagttgtttcaaccatttggtcttgtccttattttgagagagagagagagattaattttaagagagttgggtcacagtactgaggcagatttgagaatctgataaaccatgaaagtgttcagaatggaatcttcctgctcagtcagtttgttagtggataagtccattgcataaatgacatgaatatgaacaaaagcacctatacttatgcatatatctccctttgcagaatatgctttaaattttgcagaatatgcttacaaatttttaatgccgtatgcttagattttactttttgaagtcagtatagcacagagttgatgatataatagtgctttacaattttatttgatgttcagaatttattatagataatatagaggaaggattttgaattgttcacataacttattttttcagtgtcttcttttttttttttcttaaaaattgatctattttggttttgattggaatgaatggccacaataggatttgaaaatgaaacaggacagaagcctgttagtgtaaactggcaataatttctaatagtcaggaacaagaagaccattaaatcgtgggatttatgccattgaaaaggtagtaagataaaataagaatattactatactctagaactgtaaattttgatctttctgcgagttaattatctaacatccataccaagctggagacaatagctgactctttcatttacttggaggtgattgtaggagaagaaaaggatttcagtcttcagttggcaaaatgatggttctaacttgcatgtaatggaatctttagtatacccacaaaagattatttcattaagatgttaataatagatttttgaggaacagcgttttatacttttcataattaggacatagaacttaaaacagaaattcttttttttccccctctacttcttttctagcttgagaaaatctggatctctttagaaaaagcctttggtctatttaagcactctgtttgtgccagagttacttgcttttttgtgcaaccaacattttagaatttctctaatgacacaaaaacttggtttggaaaaagatacacattccaggccctcagagaacaatagcagagccacgtagtaggtctgtcagccaccttgtacactgtggtcgttagtagagccgagacggagaggtactggttgtatgaaaggtagacagaggagcctttgcaggaaggataggtgacatttgaaggtgccagtgaaggaacaacaggactctgtgtgtttggtggtggggaggggggacaggcatgttcttgacaggggaaacagtttatccattgctttataatcctagactggcatggtgtgctgacgaagagtaacctggagaatgtgatagaagtctgggttaagaaactagaccaggccaggcgtggtggttcatgcctctaatcctagcactttgggaggctgatgccggtgaattgctggacacaggatttcgaggaattcgagagcagcctgggcaacatggcaaaaccctgtctctacaaaaaatacaaaaaaattagccaggcatggtggtgctagcctgtggtctcagctactcgggaggctgaggtaggaggattgcctgaaccctggaggcggaggttgcagtgagctgtgattgtactactgcactcaagcctgggtttcagagtgagaccctgtctcaaaaaataaaaaaataaaaaattaataaataaataagaaaccagaccagagacaggttgtgaatgtgaatggtcttatacaccttcccacggaacctgaactttatcatgctgaaatgggagccctttctctttgcttacaaagctttaataaggaggcagctatgaagtctgtactctagaaggctcattgctggtggtatggaaagtgggctagacagggagcctgaaaggaaggtgagtgacaagggagtgaccctgtagaccttgagatgtgcagaagcagtggggccaaaagggaggtaggactgacccaaagggcatttgtgagtttgaagtcaggcaaaggagggtttctgagatgattttccagtgtgcagcgtgggcatccaagtaggtgtcagtatagagttcaaggaatccaggaggaacaggtctaagggaagacagtgacgttgcttttgaacataatttgatttatggtaggtgtcttgaggaaacagaaatgttcagtggacagctggaaatatgggtcaggggagttgtggatggtgaagagagacatttgaggtttgggtctacagttactgtgtggctcagtggttctgttctgggctttccattggaattggttggggagccttaacaaatagccgtggtgtgccccatcctcagattttactacagttggcctggcgcgggcccttggccctgtgtaagcagggctgagaatcacaattgtaggcctacagtggaagccacaggaagggatgagtgttgttcaaggagagggctgagcacaccttggcaccccagcacttaaggggggtatatggcgaaagagggcacagtgagaaagtaagacgaaggcagaacagtaagagaaaaaaaccagaaaagagctctgtcataaaatggatggatgtgggccattccaaaggaggatgcagtggccagcaccgccatgcactacagaaggtcagggagaaataaggattaagaaatggccagagagccttcctgcagtgattgatggtacaaggcaaagcggagtggtgtaaggagtgaatgaggaaaggaggaggcggtagatgtggacggctctttgggactgcatgtcttgttgtgtgggagccaggagtgcttctctgttaatgaaggcctaccctgtgcccgcttgggggctgggccctggcagcggaaagtcatgtctagatcactcttcctgctcatgaagagacagggaaatagtgaatgacagaacagatgatgagctgagtttcataagatgaataacagtcatttaaaaacaaaaggcaggtgggtagaaagaacagcagaggaggtggagggtggcgtcagtgccttgacggaatatgggcctgcgccttagttgcacgtgagatgatcctggagacagtgccgggtcatggaggatgtgaagattaagttgggaagtttgacttgaccctgtacttcctctccacttctaagaatgcctgaaattagcatgttaggtcactttttaacctgctgcttgtggggataagaaggatttaaagggaaggaacctggaaaccacctgttctgagtctaggcacacaaagaccagaataagatgggacctcagcagattagtatagtggtgggtaatagagatgagaaggaaaggggtggctttaaatctatttagaggactaacgaggcaggacagggaagttgattgcattagggcaagaaggtgtgggatgggtgagcaggagacttggatgactctggattctcaaggttggatggaagagaagaatatggatctctcagccaagagcctgagcatagaaaaagaggccagttttaaagatgatgatgataagtttggttttggatatactgattttgaaatgattgtattggttgtggatacttgaggaaagtagagagtagtttgtatttcttttttcctttaagaatcttaaaacaacatatatatcaaactctcctgtgaaacacaggagagttgtatctctattttatagatggggaacctgaagaaattaaaatgctgactttccaaaagtatgaaataggaagtggaacccaggttagtgaatactccagttctgtgtcttgattaattgagcaattgccaaaactgtgtttttcagctgttggttggatgaaagatgaattcttccctgtatgatgctgcacacagcttctgggcattttggatgggtgctgggcctctttgagtccttggcaaaatccatgtgcaaaattggatgtgtggagtgtggagagggaaggagagattccgttacttcttgggcctcactagttcgaacattccgtttccagacttgcaataccatcatctcaaaattgttctttgaaataactaaacaataattttcaacctataacagatgatttgttttgtatccttttttttcttcaagtagaaaatggaaaaattatgtctgtagaacacagtagactggaaatgacttgtgagaactagttttatattttcttaaaactaatcttctccctcatagcaaagccttatgtacttaaagtaattgaatggactgcagggtatactgggaattgtagttttccacttctttgtattctgaagattaataatcttgcagccctctgagtgggataaggagaggatgctctctgacaaattgttatcttgtctttcagaggtgtgcttcgggcagtgagtataccttccatgtctcccctgggctcttggcttgattctaagtaatggtaatatataggatggctttaaaattgtttttggcttatgatattttactttccactagctatctgtaatcttttcttttagcctagtttttaaaaagttgttatttgtatcaaggttatatgtgtaaatggtttacagagtccatgcttgtgtaagctgtgctgtcagtaacagtaggtactgcccgccttagcccatgcccacgtccccagaggcgtccactttcaacccttgtagctgctctttgaggataccttcatgtctagaatcacattcttacattgctccttgaagttttaggctttgtctgttgctgtccccgctggaagatgatgatttagtactcccttctcacttggccctcaccacaagcatgaccctttatcctctctcatcctcctagtgtagacttgccggaattgtggtttgatcagtctggtatttacattatgaagggtggggaaacactattcagaaatgagccatgtcataaactgttgttttccttttctacacagctctttgtttttcgtaaataattttttttaaattttctatataaacttaccatgcactcccctttagaatctcaatcggttataactgtctgtctctccttgtaagatgtttagatccatcagttatgtcatcagttttatcttctagaggacttcctatcctagagatttctggcttgctccagtctctctggattcactttctgctgatgttcaactattaccctgggattttcctttacttggagtttcccttcactttcttgtgttggatctttggtttcctggattctgtgtctttcttgttttggtggagccaatccttcagtagctttcttaagaatggttcaagagaccaaatttttaagatctcacatgtctgaaaatgtctttaaaataaaagacattttaccctcatgcatgacttatagattgagaatggaattctggaaatcactttccttcacaattctgaagcacttgctcaactgtcttaaccaccagtcttgctgttgtgaagtttgaagccattcttgcttcttgtttcctaatcctttgcatgtgactctcttccctcagcccctaatgttgtaggaccttcttttggtctttagttttgtctcagtccattttagttcatttccccacgtactctggctcaattatggaaaagctcttaagttttttttatctccctgttctccttcatttttactcttctctctttctagaactcatcatctcatactagacttttaactttatctcttcttctatttttcatgtcttttcctttttgttccattttctagaaaagtttttcatttcaattatatttctaatttccaggagctctttctgttcctctaagactgcttccctccttccctccttccctccaccttcctcctttttccttttcttaattcttttttgttttgttgtaaaagactcctgttcttatttgagggtagattattttttcttacctctttgagatactgattgtactctgttttgcatagtttccttgtcgtctaacttgcccttttctgtttgttttggtccctatttttatgttaaagtctttccccaagtaattattggttgcctggccagttgttcatcataagaactactgtggggaccttggtgggctccttagggaaatctgggacattcccactcccatcctggctgtatttagacctttcttattggtccagcctcaggtttaccacagaaagaggtctgttggcaaggttgattgtgctgggggattctgtggatactgctgtggtacttctgcagcagtggttctgaggagcccctcttttgctcttctacgaggaggaaatctctgggcatctgccagggtgaaggaggagctgtgcttagtgggagagtgagtgcttcttagtcaccccatctaccgccacactatactcggaggtgtctgctgccaccaatcgccgagcctttggatggttctgccttgtcagctgggtgtcggacttaacctttccaggttgggtaagttagttactatttgtccatctgtttctagcttccaaaatttttggctgtttttgttcctcttcttgtgggtttgttttataaaaataaacaaaaagcaggcaagcaaaaagcaaacagtactgccatttttattactagatgtgagtgctgaatctgctgtctttatccagagtctctttaggttaaaaatatgtgagtcataaaatgaaaacagtttggtttcgtttacatttgtgggtctgactgctgttgtgtgctactttataaatacctttgtaatttatgttaatatgttcatggctgtgggttactgtctgtctaatacataaacagaattgtcacagacattaaaatgtaattaacagctacaagaactgtctacacgagttcttttgaatggtttatactacttggaaacgttgaaaaactcagttgattttgcaagcatcatggaagttacttcgtttaagtgtgatttagtgcattttattttctgtacagacataggaaagttacttgtgaccacagtttttccctgtacatgaatagctccctttaacatggcctggcacagtgctggcttattataatgctatttgtgtattttccttggagtcttctgtgacctgtctttcagccatccattgcatactctgacagacggttttcatctttgacaaccaacaagaggtgtacacatgacatatctggacctactaaagggtagcaaaggaaatcatattgctggatgttaaaatcaaagttttaaagtggcttgaggctcctccatggaaaagatggtgcaaacaccataggcagttaggtactggcggcagtcctgtgctgggagccctggccagagctgtgtggatggcagcaataagaaccctcactgctgaggacataggaagagccaggctgagtgccggaatccatttccttgggcataaactgagctgggagaaagggatgtttcctcccacaaataatgtgagaggcatgataagtacactgtttcctgtggaaagctgacctagtgattgtattttattgggatatttgatcctttatttgaatgtttttaaaagtatctgggtggtgtcattattaggaataccacctgattaattttttttttcatttggttacatttgaacggtatgtgaatgtactattttgaagttttaaaataactttgaagatacttttggtttcctttaggcctgcttttcaggttaagaataagacagagaatatacttctggtgtgacttttaaaaaatgtcattttaccttagaagtggtccgacagatctcaagctgctcttcacatgccctgccctttaaatctcaggctgttcattggagttcaaaatacagctcctctaccgatcaaataagctttctttaaaaaggcaggtggagaaaacaaatgtttgtttcagaaataattttaatgtccgaaacgagttgctgtattcacgtcagttatgcaccttgtcattgagcatggctgctgcagttccaaactgtcccagtgccttcctgtccctagcgctcttcctcacagtggggattgatggatgggtcatttccatcctacctttctatgaggaaagccttgtagcaggctgccaggtgaatgcttgcctcagtaccgagctgtgcacaaacgtctgattcattattttggatcagttttccacgtggtctttattttgtatttgttgaactatttaggtaaagtgtgaattataaaagaagctcaatcattcttcttcctccctggaaagagaattgaggaattggtgtttccttggttgtcatcactgatatatgtgggtgcttctattgtattgttatcacatgaggataaatattaaggatttaaacctcctgtgataaagaaatggctttagaagacagaaatgctgaaagggtttatcttagtctgttcaggctgctataacaaaaataccataaactgggtggcttataaaaagcagaaatgtatttctcacagtttttgaggctggaagtttgggatcaagatgcttggcagattgagtgtctggcgagggcctgtttcctggttccgggactgtgccattgggctgtgtcctcctatggtggaagggggtggccagctgactgttcttcctaagggcttcagtaccattcatgagggctgtgccctcatgacctagtcacctcccgaaggccccaccttttaatgccatcacctggagggtttagatttcaacatatgaattttggagggacacaaatgttcagaccatagcagatttaagacaatacaaaacaaaacaataggtattcttgtgaaactacttagaactgttttaaatgttttttagaaataggatttagagacaatttttgtcaatttttaataacacttaacggtactttgttttgctaatgtgaaagaagaattcagcaagatcattacaatataaaagaagtgacagaccaagtacgaatagggtttatttgggtatgtaattttaagtgagtgaaggaagaggcatttgatgatttgtaaaacatttctgatttaaaaaaaaatgaatttgttttttttgcctctaaagcgttaaattttcttggtcatcagttgaaacttttgatttcattttaattgctatattgtatgtgcattgtctgtatatttcttcaaaggaatttaaagatttggaagtctgttaccaagtgtgtgtcagaagaggccaaattttcagatttaatacttttagctgttttttctaatgacacttctttcgaagacgagattaacaaattttttttgtctctctgtcataggtcatcgtgttttttggtatagttcattcatcttctgttgcctcaacatctggccataaaagcgaataatgaatggttttttgaatttgaaatttgcatgtgaatttttggatgagagacatttttatataatttataagtaaccattggggactacatctgcctcataaatattagcaaaatttcacactgagattaatgagcttataagttgttagtctgcatatatttgatttgcctgaaaatagggttttcaggaagtctcagtgacctatattaactactttttataagggcgaggacatggaaagactttattttatcatgcttttcttcacccttttagtagacttgcaggcatgcaagtggaagctacaggaattaatacggatgtcagaaaatatgtgaagagatggatttgtctagagtgagctataaagtgaatttcttcatatcaaattttatatgcccattgagattcttaaggaaaaaaaagagtgagcattcctgtagggaaaaatcggttctgagagcaagtagtaaaatcacacttaacaacttcagacatctgttgaaaatatgtctttaaaaatatttaaaatatcatttccaataatgttctaatcctcatagtagcaggagagagcatttgataattgaggcattactgatctccctgagtgagttccctacacaccagggagcagtggctggggcagggtgggggcggggagggcaagcagttgagaggctgttctctgcctttgccagggagtagccattccgatggtccggtttgttcaggacttgctctcttccttccagttctagctccgaaacaccctggattacagtctttgaagaagtaggagagccggtggccgaagtgcccactcatgacctggccttgctagtggaggtggcaaccagagaagctggagagcgcctcctgatccacagggaacttcagtaaatccttttgcctccccccggtcgtcagattgcgttcatactgtggtagcaggccccgtctgaggcccatcctggtgttgagaggctggatgctagcagggagctccaggagacgttccgctggctgtttataaccagatcctgaacacaaagcttccagcctggtgctagaggccagggagacctgaaaatgtctcacttcagggcttagggtaacatggaataaatatatttgccattgaacaaattatttaggttaaattgccttcgttgtcttttctgtatctatagtttaaaagatttcctatgccttgggagctgcggattgaagagcttgctttgaatgaagtcttgtcaaatactgagtctgtgtggtaacttagacctggtgggaaaatgtggattctggatttcctgtgaaaatagaagtacttgaaaagcaatgcttaaaatggtagtgttaaaaaaaaaaaaagtcacatatatccagctaagagttgctaattctgtcgtattgcacattatagatatgtttacatttttaaaaagctgtgtgacattggactctagactcagaactagaatattttaccaaacctctttgttattttgcagtaatatttagtaatgattctgtatccaaaaatgtcctaataacatctaacaaaccatgttcctaaagtctgtgcatgttttgtatttgggatttttatcattttcaaatatctagaacgtttggatttcctagcattatgcctaaaagagattagtatttatgtcagtaagttccgtaactagaatctgagtgattttttttgccttgtcattaatctgaggaggtttgaaactaagactgctgtcatcgtttctcctttcttgtacagcctatcttgctacggtttcttacatataccatagaagcaacaggccagcctgtggtgtagaaaagtgagatttttggagggcagggatactgtagcttacttatcttttacatttatcacctcctagctagtacagtgcctggcatccagtaggtgatggacaaataaatggaaggcagtcatggaatgctaagtgcaccccatggaatgttcttgttcacttatgctatgggcagtctgaaaaacggtgctagacagagtggaaatcagatcccatggataacccttttgcacatttgatagggagtggtggagaaggcctgatacagatggggacctgaggttttcttggagtgattaagttgctcaaggtcacctaattaataagccacagggccaagatgggaatcctggactgactccaacactgttgctcctaattactgttttatcctacttttaggactctggagatgccacatggaaagaaacattctggttggcaagtatcttcttacatgctcttacttgctccaagtctttgggacagcatatgacagtgggggcagctggcacatctgtgttgttcccctcctgcaggaacaggggcttcttagatgggaggctgagggcccatccctgtgcaggtgcatgtcctgcttgatgataccaggtccttccagggcctcctgggactgggctcattgtaagttacaagagcattcacttctggttttccttcttgaggaaccacattgtgcttttttcctggtggcttatgtatacttaattgaagacttgtttttctctttctgtttttctccatgttcttagatttaaaaaatagtaaatgagttaatgaatgaatatgtgcatatatgatattgtacgctgacatattgttgggaagttggaatagagtctgtgtagaataaaataaaatagactggatttaagcaacagccgcttctcaaggcgagtgatcctgagcaagttacttaaatcgtctgaactacaatttcttttttattaaacaagaattgggattagtcgatgagatttcatgtgtaaaagcaggttgcctaggacctggcacttagtgctcaataaatctccttcctccatttcatctgtttttggaatcatacctggtcagtttaatccattgtttttgtttgtttgttttttgagaaggagttttgctgtttttgcccaggctggagtgcaatggtgcgatcttggctcactgcgagctccgtctcccaggttcaagtgattctcctgcctcagcctgtcgagtagctaggattacaggcgcgcaccaccacgcccagttaattttgtatttttagtagagatggggtttcgtcatgttggccaggctggtgttgaactcctgacctcaggtgatccgcgcgcctcagcctcccaaagtgctgagccacctcccaaggtgcgagccaccactcctggcctaacccatcggttttcagtctgtttggtttattggcttgctaagctttctttaataatttctattcagtaggacagagccttccagggaccagaaaaaggggaaataggtatctgagaaataacaaggtctcttcagcacccttttccaactgctgcccccacgctgtggagtggatgttgttcgtgagcctgctggcgtggtcattggtcatccttccacataggttgtttcttggtgctttgttttcctccatgctgtttttcccctggaacccctgcccatcggcccatccgtattttatgctggacactcccctcctgctctgaggctactccgtgtgctgaagacccctctactcttccttccatcttgtgccagccattcttaccagaactgtcggacagcgaggcagtgaccacctgaacaggccatttcatgtttctttctttcccttccagcctacaagcacgccagcagccccgtgcatggcttctcatgtctgctcctggcaccttgcatgatgcctgacagataaacagaaggctcttagagaatacgggttgaagaaaaggggaatgggcacaaattttcatatcatatttaattacataaattaatcacaggttagtttatgtaattatgtgattaatgattggaaagttctggattagcccactggatagaattttctgtcacaataattgtgttcaactgaagattctgacatttcataagttcaaagtgaataatttttatcatactttgaggagagggtaactaatactagtcttttattactttaaacttaaagcatatttagtcacaaatatttttgtaaactttgtaaaaattagtggtcaatttttgaaggagagaactggtgatttacaggataagtggaaatctgaataaatattactgaagatctggaatctacaaatgatctgcgttgatgcagttgtgtttctatggttggctgcgtgcagagctgtgatacacagtgtgaattattcagcaaatgcaatggagtcttgtgcagcagagctttactgcagtacctgtgtgctttgcagattctccttcacttacgtgggtttgccttcttgtctcctgaaggatggcccggtcttccccacctgtggacagtctcaggcattggtaacttcaggcgtctgatgagtggcgtcctttagaaggctctctcctggatctgtgcccccagcccaacctgtctctcagctgcgggccagccttgtcagcacccgccaaagcatttctcagatacccacggcctcctcagaaacagctcttcctccatctgctttgcccacatcttctcttaatggaaccatagtatcctcaggcctgtggtggcagtgccaaagagtcatattggattttgcccttttttcctgtactgactaatttcttatgtttaggttttttgtttgtttgttttattttgtttaaacagggtctcactctgtcaccaggctggagtgtagtgtttcacggctcactgcagcctcaacctcctgggctcattcctgcctcagcctttcaggtagctgggacaatagatgtgcgccaccacacctggctaatttttaaatttttggtagagacaggatctacctgtgttacccaggctgctgtcaaactcctggtaggctcaagctatccagccacttcagcctctcaaagtgctgggattacaggtgtgagccactgcgctcagccatttagtttgttttaatatcctggagtaggggccctgactctcctgattccccttctcactgactatcagctgtatgctgtgggaatctctcacctgtagagtgaagttggtaagagtgagttcaacaccaaggctcaaggcctggcatgcatggtgtttgttacacatttcccccaaactaaaaatcagcaggtgcatctgcagtccccttttcagtgtggcctctcttttgcatgggtcctctctgtgctggctccaggcccgtccctttctgactatgtccttcattcctcttacacaaaccccgccttcttaaataggtcccacattttcatggtgccattatttgtgacttggaagtcctgatctctttccctgtatctctgtctggtacaaccctggctactcctcaaaactccattccattctccttcgtggagctttaatccatttccagaacgtgcgtagtgccttaagcgtatctctttatggtcgtggcatattgaatcttgacttatggtaattggaatatgggtcctttgctcctttaaggcccttaagagcaggagccacatctggattttatcgctgtggcacaaagtggaatagcccacccatagtaactgatcaggtaaatatttgactttagttaacatataggatctacttttacttgctaaattttacagtattctttgaaagaccatctctaaatggcctatttgagtatatagattaagagtagtgtctagatatatatttgaggctgatggccattcatttattcattgttcccgcattccttcactaaacgagcactacaccatcacactgccatatgttgtgtagcaggaactcagtgtatggaaggaaagtcattctttagcttcataggaaatggttgtggttgtgcattgcatgatcaactttcagagctttacaaatcactcatttgagtaccataagctttcttcatatctgcatccattttccagtccagttagtgacatctatattttcttccttaaaaatgtatggaacactttgccatttattcaaaattaattgcatttgtaatggtcaatgttaaaagccaggtgaggtgagaaagttttcattgaccagctgtattcgattctggattaatgtttttgattatttttatttcacactctagattttagcatgagactgatagaaccttaaaattatcacagtctttctccctgccagcttctcctcacaaaataaagatgcgagtctctgttcagatttaaacagttcatgccttttcagtgagctgctgtttaaaatgagttcctcaggaaagaagtggcaaagaaagctgcgcgtattaagtatgttttctttgtcttaataaaaggatggcttactgccgtgttgtgctgttgtttaatattatagaggttttactgcaactctcttggtgattacaagagggctacgttttggctaacaaatgtagtaaatgtgatgaaaatcccctgtgttgtacatttctttgaataacatgtttatataacgtgctaaatacttctgttaaagaactgctttcctgaaattgcaaattccattccagattttagtgttactgaagtgtactgttgaatattccaaattatatgggtatttttaaagcatctttaaaatttgtctgcatacactgtcctttttgaagttgggtctctgaaaaaatttagagttgtatctctggatgatagtgttgactttcccgtggtacctaccaggcactgaacagaattatttaaagaaatttgccaaagctttatattttggagtagatagcactgatgtgactgtgtgaataaatcacatgcacagattaataagtttgtattaatgtttgtaagatgatattgtggtggtgttctcagtgaactgtgggcctctttcctcagcctcacccatccggccctgtggattttaggttgagtcctgggtttgccttgtggacttgggcctcgatatctgtgtaggctcagctgtctcgtcctggttccagtggctctaccctggaccacggcccactcagcccgagactcactgctgatgccggctgggcatgtccacctgggggcgcctccagcatcccagttccgagtatactcatggtgtttcttttccccagtccaccgtttgcccccataaaaacatggcactgctcaatctcttaagttgcccgcctgggaagttattatccttggtgtttttccctcactaccctcctccacttgatcactaattcctgaagactgtcccagacactttctgtgtgccccgtcttcatagcctttacccaagttgaggctgttgccgtcactggcgtgggcagttgctttagcccctcaaccagtgtatctgccagttatcgccctcctacttccagatcattctcactctgaggtccacagacccctgagtgttcacagatggacctcaggatgctgcgaatcctttggaattaaatattaattttttttgttgttgttgtttgtttgtttttgagatggagtcttgctttgttgccaggctggagtgcagtggcgtgatctcggctcactgcaacctctgcctcgcaggttcaagcgattctcctgcctcagcctcccggaaattaaatattaagatttctatatatgtgtgtagatgcatttttctggccaatatactctcaaaggttctatgaatcccgaatgtttagcaaccacttattatttattctttcacaaagagctttcacagtaatcttgttaaaataaaatgaaaatctgatatgttattctcctgcttaaagttctttagtgaatatctgttgtgaaataaaatccaaacttgtgagtctgatggcatgacccttctggactcctgtcttcctgttcacccctattgctctcagctctccagcctggatctaagcaccactttactgagatgcttgcagttcgagattgcatggtgctgtgtttcactctgcactgtgctgtactgttgcctgtggacccgcactccttcccctctcctgtttccttcaggtgtctctttctccgtgcttcttccttgcctgctggctccacctacatttattcaacgtctacttcaataacgtgtctccctatattaaaattacctgtagctattgaatgtgtcccctgctgaacttgtgaccctcatgagtattttcagagtctggcacataaggtctcaatgaatgctaaaagaaggaacacattggagctgccggcctctgaaagttgggtccatgccacctgtaggccttcttgcataaccatatttatcctttttttttttttttaagtgagacagagtctcgctctgtcacccaggctgaagtgcagtggtgccatcttggctcactgcaacctctgctgctcgggttcaagcacttctcgtgccccagcctcctgagtatctgggactacaggcgtgtgcctccatacctagctaatttttttttttgtatttttagtagagacacggttttgccatgttggccaggctggtctcgaactcctgaccacaagtaatccacctgcctcagcctcccaaagtgttgggattacaggcgtgaaccaccgcgtctggcccatgtttatccttgacttttgattagttacgtaagatcttttgaagggcttctctcactctacatacttgatcaggcggttgcccttcctcatgcctctgccagctgggcgtcacgttctgccttctgtttttgctttgtggtgccacacattttgaggctctcctttagtttctccacttatctggctaccatttcaaggtaccattttaccttgtgtcagcgaggattcttaggtgtaagcgatgaagaccgagtctagccaattcaagcagaaaaggaattgacaggctgttgggaagctcacagaattgccagaagggcaggaacaagggagaccacaccatgaggatgctgcaaaaacaggtcacaagtacagagaagacctgagcatgccagacacaacttgtacctccatatcgccccactggcatcctggtggcagacacatgtgcacacacctgaaattgggtattgctgtgtgtactgcaaggagaagttcctcctctccttgtttctttgtattactggctaatgagtcaaagaccagggcatgtgcatctgattggctgggtcaataatctagctgcctgtaactccagttactctagtttctagtttgggaaagcaagtaagtgtttggcctttccagcctctcttttgggaagtggagtctgcctcctatcaggctcataataaggtgaggagttacccaaatcccagaagagggttcatagcttgggcagccaaatggttggacaggtggtcgctacattgctgctttaatgcttgcaattgcactgggcttgctttaggaagtgtttgttggtaagagaattgtcatcatcatgggtttgtttgcatcgtgattgaccatttaggaagtgtttttgcatcagcatttcattgagtgaggtggaggaagtattgtagtgccattttgtaaggaggaggtaaggaaactgctggacaaagaggtaaagcagtctgatgtaggtaggacagttagctgttgagggcggaactacagcttctgactccagtgcccatggaggctctcctccgcaccagcctatcccggctgtgccctgtgcattgctgcaaggggccagggaggagtgttcgcatcatacccacgcactcggagcctcttccaaaggactgagatgtgtactagggtatctggttctgcgagggctaatttggcattttgtattcttgttctgtctacttgtgttgtttaatgttgaacatctctctggttgactgaagccatatgtcattcaaatggaacctgtgctttggcgttggcctgacaatcactcagctgtggagtacagcaataaaaattaggaaaactgtatctgttcattagaccagtggaatttacaatcacttttgtggctgtgccccacagctctacactctggcaaatgagagtatcgtaaattaagcctttgcccttttttccctctgtgaattgcatatttgtttcacactcgcaaattgctgtagaagccagatagatgagcactttaaaagattacaacaatggaaaatgtgttttgggaatgaagtgcctcaaaacaagtactgtaagaggtattctttttcatataatgctaaacacttctgcaaacccttaagaattttattttagaagtatcgggtagcttttctgttacaggaagcagagggtttatatcattgtttttgtaaagtcaactcttgctgggagttaagatataaacatatgacacatgtgtatatatgtgcagcgtgcgcatatgtgtgtgtgtaagcttagccttcctgtgttttagactagtgatctttcacatacagcaggaaagctaagagtcaactcattcatgatattgggagaaaagcaaagcaaaaactgcaacaaaatctcaaaccctttctgcagcagcagatggcaaacagtgatcagaggagaaggacccttccagcattagaagatttccaaaggctgttccagtaggggctgtgggcttctgggagcccagatgccccctgatggtatatttgagttgtgaggtggaggccaggtggcaagagactgcaggccaatgtcaatgaaaagcctgggaggaaaaagagatttctgggagagggagacatcttagtgtgagcaaatgaccagtcgtttagtagagcgggtcaaaggaaaagaaggatgtgataagagagagaagggaggagctagaaaatggaatgctggtagtgaaaggagagagaaagaaaaatagcgagaatgtttcatgattgtgttagaggcaaaagcttactacaaggcatttctaagatagtagataagatgatgtagtgtttaaagtgtcaaacttaaggctctttatagagtaggaaacagttatttagatttattgtgtaagttttgcataagacaaatgcacatcagccaggcacagtggctcacgcctgtaatcccagcactttgggaggccgaggctggcagattagctgaggtcaaggagttcgagaacagcctggacaacatggcgaaaccccgtctctactaaaaatacaaagattagctgggcgtggtggcgcatgcctgtaatcccagctacttgggaggctgaggcaagagtttcagttgaaccccgggaggcggaggtttcagtgagccaagatcgtgcaactgcactccagcctgggccacggagcgagactctgtctcaaaaaaaaaaaaaaaaaaaaaaaaaaagaaaagaaaagaaaaacacacattgatggcttttggtggatgttagttattaagcttttagtatttttaaaaatccttgttagttttgtatagcgaacagaaattttaaattgaaaactgcatagtcattttttcgtgtttcttgtgtaatccatgttctcagactagcataatttataagcacttttgtggctgtaaagtagagaaaaaggctaaagagaagggtttagaattctgtactggtcttgttagcttgatagtagaggttagaagggtatttaaaatgcactgacagtgacagcgtgttgcctggggcctgcaggagtttcgagagagccctgccaggtgagttggctcaagttaggtcttctccttctccctgggtggggcctgcatggctgggaacagcctctctgggagccactcttggaacctgagaaagctgatttctgttaattacggctcactcaggcagtcacaatttggtactaggagagccagaagttgcttttctggacccaaatagggtttagtatatggtatttgaaattttagatgtaccagatttgaaattctggcatgttgtatttgaagaaattgcataatttctactagtttttgttttcaaagctttggaaaatagactcctgcttatactgttttaaaaatatatgtatgtatacaatgtatgcacacatctatgtatatatatagtgtcacatgtaatacctttaggttctctctaaatgtctgcacaaatggcatattgtcttcggttttgcatcattccttctcagagcctgaggactgcacgggttcccatacctcaatactgggctactttcaacacctgtggttggaattttagtctttagtgatacatactggtggatctccagtgttcctgtccccattgtggggaagtagttatagcaataattccaaatggtagatattccttaaaaattgcctcacggtttggggctacagtattcgatttggggtggcggcaagtttaacttcctccccatggcttatttgggttaataaggcgaagatgtgttcttgactaatgtgaggaggcatcctgaaggctagtgtagcattgggggaagccctaatgcttaagtatgcacagttgatatttgagaactagaactcatttacttgggtagtaacatacatacttctgctttaaaataaaatgtactaatttatttcagagtcaagcaatcatacagccagtatttttttaagcatctgctgtatgcctagcatggccctgggaattaataaaattctgccccatcactgctcatcctgtcctgaatgattcctctttcacttgtgtgtgcctttcttccccagctgggttgcagctgttcaacagatcttactctcgtttctcttctctgctagttgaaagggagtcctccctctcagccttggtcccggtggagcagcaattcccatgttctgggacccatttccgcccagctcctcgggcagagttggccagcctgcctctctgctgtgcttctttgatgccactcagaatctccctgtttgcccatgggctccctctcttctgctaggggctgtttctgttcagagattctgtcttattcatatttgtaccatctacagggcctgggatgattctgtggacacctaatcattgcacaataaagtatcagtcaacacatgtgaataatggaaaatatagaggtgtttgaaatccatttgggaaaacaaagcgtagctacagataccaactataagggtgccttgccttgcctttttctttcattgctgtggtctctttcaatcaggagaccagaaatatagcacggttcccatcacacactggccacatactcttagacatttttctgtgaaaggatactgattctatactttttcgtaggattgttatggaggtaaatgagatcgtctgtgtgaaaatagtttaaaacgtttaaaagtgctttgtataacgtcttgctattgtcgtgagtgctagttttgggtgagggaaggtgatatcagtgacaacattttataatgaggtctgttcggtagttattttgtaaatcattttgtagtacacagagctgattagctttatactgtatttttgtggctaggggcttttatgttgaggcctcaggatagagaacaaagtaaggttatgataaaatcttacacggggaacccgaaaagagggagagttcgctgtcttaatttctgcattttctaagggtagagcctgaattaacgcaactgccttaggtttcttctggcctccctgggagttatagtcaaggagtgtttgtgaggcgcctttaggctccccataccgacagcatcttacttcggggctctctccctgcatcaaatcttcctcgtcagcttgcagattctcaattatatgttaaccgtctttattcttggtagcattattgtaaatttggggtagtagttataatttcttctaattgtttctcccagagctattgtttgcctaatattcatataaacctggcaaagagttcattgctagggggattcccaagttactccagggacttggtgatctgagagctcccacagttggggtcctccactctggacaaatagattgccttgtcttcgtgacaatttacttttcttctttggggatctgtgtggaaagttaaaataagtcatagcccttcctctccttgcttttctttacttttctgagctttacttccttctcctctggacgtgctgcctctgaacgccatgtcttccatgctttcctctccagcgtgagcctgacacacatcagccccagcactcggcccacgctccccacagcatgatctcactctccgatcctcacctcgggactgtcacctcgtctcactccagccccatctcttcacctttccttgctttgactcttgacttcttctgagagttgccggctcctctgagtggcaggtgctggaggtgctggaggtaagctgttacctgttctgctggtgtttgccttcctcctgtgcaggtgtttcctgttaacctgccctggcagttcagcctactcagaccagcagtaagttctctttctctggcaatggcattttgtatcaacaacagctgtaggtcagggaagaggcatttcaggagccagaatcgcgggaccctcatttattctgataaagtatcacttggaactgttttctttgagattctctgggaaaaaaaatatcgtgccctaatgcagtgttttctaaactgctgattatgactcattaatgggagcaagaaagtaatgtattagactgcaactagaaatgtttttaatggaaggaatttgatgtaaatagtagaagatacaaatgtagcacatacagcaagtgtcctctgtgttcaaggttttgacataaaatatgtttcttcctccgagttggcgtcaaaacatttgacagccattactctaattaactttcagtattttttaagctcctttgattcccctctccctttttccttctaatgataatttaagaattttttttttttttgtagttcagataaagtagatttagaacatggtctattttcaggacaacctgatgaaaaactgaaaccatagctaagtgatttgccagttgcacggcaggtcttctctatttcatgcaggtctttgcctcctaagcagtgcgccttcccagtaaagctccagcagataagggtaaggtggccacctggagggccttctgtagatgggcgttccatctgggaggattaggaggtgtaaggatggagtgcccaaactccagcagttggtttttcctggatgctgtgtgtgggctaatcatagtccgctaaggaggtggctgccatgtttctaggattattaggctaccactagtttggggagtgaagagcaatggaaaaaggttctgagattcaggaaccaccgaatgcccagatactagtgttgctaattcttttttctggcagtaagaaatagctgtaggttttaaatgattgtgagtgattattgaatgtagtagccctggtcagaaaatattatcatttccccccagttccttataccttgtcttgagctcggggaagtccttccggactacagtgttgctgctgggataaagtttcattgttcttgtaagaaacatttttgaaaggaaactaaatatgtcaaatgaatagttggaaatcgtgtttccctatgacatatacagtgtatcttttaaatttaaaggatttattaaagtgaaaatcattgtaggatactgtttgaaacctggctttaccttctaatggtaatatagctaaaataaagtaaaattggaatatgatctaatttcagaactaaaatattttagcccagttatccttatatgtcactggattttggagggttctgtcttaagacaggtatttgtaccagttaatgtccaaaacagtgaaatgcattcactgaagtctattgacttaatttcagaggtgcttagaatggacaatcagaatacatccatgttgaagtattggtttgaggtgggtaagtatcattttatgattatttattgagtttcaaaatgtatagtttagaatgcctaattttaatgatttgtaaatataaaatgaggaggcaatggaaagaagtgagacatttattttgctgaaaattctaccttcagtaagtcctcctccctttcccctgcctgcccttgggtgtctttctgttactgattttaaaatgtcaacatcctatatttttttctgaccaatcttttgggtctacttggtacatgttccacctgatgaaattttaaaagttgcagattgttcttctcaagggaaataactgaattattttctttttgtatgaacatttactttgaaatatgttgatatttcaagtactttgatactttatccaaagcatcacttcttcatattgccacaactttaaaatggagttcctgtttcttgcccagtatcacaagtttatcatgtaagttaagattatgtgctaaacgactcacaacgaagcctccccttcccacttgtgcctagaacttacagtgtctgtgttggtagaaattttgtatcctaatattgtacaggttgagtatccctcatctgaaaatccaaaattagaaatgtgccaaaatcctaaactttttttgagtactgatgtgatgctcagaggagatgcttattggagcatccaagattttggatttttgggttagggatgctcaaccagcaattatgtaatgcagatatctcaaagtttgaaaaagcttgaaatccaagacacttctgatcccaagcatttcagataagggacattctacccatactttctaaattaatctcaactacacagattttacaattttagtgttgctgttattgtttgtttgttttgaattttgttcttgtcgcccaggctggagtgcaatggtgtgatctcagctcactgcaacctccgcctcctgggtttaagcgattctcttgcctcagcctctggagtagctgggattccaggcacctgccaccatgcctggctaacaattttagtttttaaaacttaaagaaatgtgtgtgcatttctcatttacaggcttccttcctctattcagcttcttttcccacccctgctggctctcttgtatcctctgggctccccatgccttaccccgtactgctctcctgggacacagcatgacctccaaagtgtccttgcctctcttgtcccagtctgagtggctgttcgcttcctccacctttcacttccgtttaatgactgagcctcgtgggagagtggagtgagcacttccgtttgtgactactgggtgaaattatgcaggtttcctagcccttgaccgtaacaaggacagagttgaaccagtggccattcaaagtcttttccagttccggaagtgtatgataaagtagttcttaataatgtgtaactgtgccgagccttccaaggaggaagggaatggatacatattttttcatttaaaacaatagctcattgatccagcaatatgtggactgtgtactggatatatttttgagcatctcctcttcccttccctttacaccaactcaaactatgatccagggaacaagctgcaaggagttagtttttgaaccactgataatgcttttgtgttccactgaccctacctttgtacatggaattcaggggaggaatcattgctttgtgaaatggtgggctggtggtagcagcatcttcgaatgtagaaagatttatttatttataaacccactcctcatttgttatgagaacattctgaaactcaggaaggcgacagaagactcatgctcatttgaagcctgtcctgtcctaggtaatagggacaaaacccccagcctcttcactgtctgtgtcagtgtgcagcctcctctcgggagagcagtgggtgccagtaacgtaccaatgctggctcttcccacgggactgtctgttcatggattctgcagttgacacgattcccaaagtctcagaggaagaaatttaagagccaagttgggtcttggacagtctgtggagaagttggacccttgcatgattaccattgctattacttttctccattgctatgtttttcaccatatacatcatttaaatttaggggtagatagattaatgagtacattttctccctgaaaagtatcttcatggaacacttagactgtatctttttaaaggatgatgctttaaattaatgcagtttttgaaattttcatttttgatgggcttggcattttcttctgttttcatcagcttagttacaaaaatcattttgaggagggccagaagagaaaaaggatataggaaggctgtggagcacccaccctcctgcaccctcagagagtgggcttttgactcgtggtaacaatgcaaccgcataatctcacctcacccccaattctttcatttgaaaaaaaaagaagaaacaatttcaaaggctgtatttaaaacctacacacgaatgagtaatttatatgcatttatcatgcaagtatacgatccccagggtggaaagtggcctgcagtgaatggtctcgctcctcctgttcccctacaaggctccccttccaaattggaagataccagttgcttgtctttttgttgactcttttaaaattctagtcctcttctggtaaatcctattttctgtaccctgtccccaccccatagttatctcaaagagaacagtcttttcaatcaagcattcactgcacatgtcccagtcatgcggttacaaagttgacattgcagcctcagcaaaggttatctctttaaaattttctgaaattcccctttggcacattcattttggcagctgggtttatataggaaagtggtaaagctcttggctcctctttttgtgctttataaaaatagaaatctctggccagaagggcagataagcaagaagctcctctgtaattcccatcacttctgcttcccgagtgttttctgttttacactgtagtaaatggtgtcctcaccatgtgcttgtggaccaagtgggtggtttttagaaacacgaacatactgtagcctgacacttattttaaagtcttattagaaaaccctgctgttctaacatgtgtgtgaagtactgttagactgtgttgacttttgattttgtaatccttttgcattaaaaacaatggaaaatctcaaagatgacattcacgaattcaaaattaccagttacagtctgggcaataatataacaagaaagagggaaaatccaaattgctttgtagtgagatgtactcattactaaataaatgataccacgagtgtgcttttcctgggacagcatttttgggatggaaacaaccaaatccccgtgaggcaaggcagctcaggcctttttattttctaggaaagtgttgcttctgtgagcagaattgacccgttcgttactatagattacctcctgagcccttcatttctttccacgtatcctatgaccttcacaggaatagagttttacgaagtcatgttgatgcatttccatagttatgagtctcgcatttaaaaatgactgtatatttggtatggaaaatacttattttttaattttgttttaaatgcaaatattgataccctaggtgtcaaagcttccacattaaaagtgagtgtggctctttttactgttaaaaattttttcctgttttatattattatatcaataaggcacacaaacttataggtgagtttttcactgctgtgacagtttaggaaagaccacattttaaaatgccagctctgttttcttcaagaataggcagtatgaattatttaactcttaggcaaccctcctaccataccaagtttatatacactggaaatatgctattttttaagctattttagaataagatttgtcatcccttgtattaaacaaatgctcttctctcagaagctgcggattttttcctgttgttcttctattttgtcaaaaaacacactgtagactttatagatctgtggtatcgaatactctcgattggatcctcaggaagaaagtgttttaaagtgtgtaattagggcacttgagcataaaactacaattatacacttgcgtgttaattttgtgtacagtaagactttagttcaacactggttgtaaatgagaggaagcatttgactgccagtgaatgcctgcattttatgaatacttgaataaaatctcctctaattggctgacctggaaagaaaggtgaaaacatctgtagttcagtgggagaggagaatacaaaatgtgtactagagatttccttttccaggtacctcgaaaagtgatctcactcttgtgtacagccgtgtttgctgtgccttcgggatcgtttgtgctattctagctgctgtttcacaataaaggcgaacagggtgaaagcagtttagataggcaaaggaaaagaatcaagggacagactggcatggacagtagttggcaaggaatttttgatatggttaaaaaaaaggctttgggctgatataattgacttgcgttggttgactatacatttgttaatcaaattctgtgtacaagagttaggcaacactccttgaagcctgaaggagttaattttatgaaaactaaaggatgtaccagtttgcaaagtggataataatgtgggagagcttgttaccctaaagagatagcctggactggaaatataaattaatttaagaagtgtataaataaattcatggataatagattcataatggttattaagaggaaataaaggctgttcaggacatatccctgacttctggaaattgaggtcatgagaggcactaccatttagttcccacagctatatagaatattcactccgcagaacattggtctgacctactattcacttcagctgtgatttgctaaatatagagtagttgaacttagaataagcagtgaaattttgtaggcaattaataattgtaaagaaatccaagagggattgtatgtgtatgtctttataatcttatatcgtgtgtacccttctaagttttataaaaaatttgtcacgaaaaagacttgttactgataaaaaatgagaacttttcaatgtttcccaaatcaaaaaaggtaaatctattttatcctatgattttttttaaatttctaagctaatggggagggttaaattatcccagatgtgttggtttcagaaagcctgttaaaaactggcaatgtttatggcccagaagttacctgttaggaaggaaccagggcccaggccagaacatactggacttcagagcaatgtgagagccatggacccagcttgtgggtgtgggtggtcagctagcccattctgcagtgtgggacactgcctgacccttttgtatactttgccaacttctttctcatcccgggtcatctttttcctgttagtcaagagaagccagatagaattggagggaacttagctttagtatacagtgcatacagtaagtgctcaatatacatttgttgactatttctcatttttcaagggtgaaaggtgaatttcaggaaattgtggagtttttgttgttgttgttgttgtttgttttttccttagacaaacctaagaacaagatttatttttcttcttaaaataagaaagaggggaggaaaaggcacctaagctgtttaggagtctcatttgggaacttagcttaagggactgtggaatgttgagcagttgtaagatcttgaccttgtaaactttatttattaccttctagcacattatttttgactggacatgttgacataataaaatttccttgtgcaattggttcaaccacgcatcagcttagcatctgaatttcttgctgtggggaattttcagtctgtctcttatgcatgaaaaatggtgtttgatcttcctgtgaaatcaggagccagcaggatttgccacatgtgaatggagctgttgtggacttaagatttttcttctgctttttgctttcccattttgtagaatttacctggaggggttcaaatctgtgatgaaaaacaaacacataaaaattaaggagctttcttctgtttaagataaattgttatactttttgataactcttagacagcagcagtaaataatcctaaataaatttcattttgttctagattcatgaaaaacagagttggtttaaggagtgattttggtatatattctttgaggctgttaattctttatacctataccacaaacagattctcacattcaaaaataacattatactacatatggttttgtagcctgctatctttaaacctcaactcagtaatatatggacagaactttttgttattaaatatagtgtaaaatgaggattgttatttttaatggctctatagtattttattgaatcctcacctctgctcttttttttccccccctcaaaccagttccctgttgatggacatttaaacatttaggctgtttccctatttttgagtggagcagcaatgaactccttgctacacatatctttgcatacttgtttcataccttttctttttcttttctgtttttttttttttttgagacggagtctcacactttcccccgggctggagtacaatggcgcaatttcggctcactgcagtctctgcctctccggttcaagcgattctcctgcctcactctcctgagtagctgggactacaggtgtgcatcaccacacccagcgaattttcttttttttttttttttctttttttttttgtatttttagtagtgacggggtttcaccatgttggccaggatggtctctatctcttgacctcgtgatccagccacctcggcctcccaaagtgacaggcgtgagccaccacacccggcctcatactttttcttaagataaattcctaaagtagaattttgggttaaaagaacgttgtttctatacatattatgacttgccttacatattttactttgtaaattcaccatgattatttcagtttgccctgttgctctgtaatattttggattatgtaaaatgaaaacataaaaactcactgataagcatctaggatcagtcattaattataaaacaaaatttacatctaggtctaaaggcaagaaagatttaagcataaatgtgttaaaatgtgtgttatagaatgataaaaatggagacgaacagtttagacttctgtattaagtgtatatacatatgccaccaatattttaaagctattatttatatccattaaaatgcctaaatcttaagcatgcaattcagtgagttttgacaattacatacgtctaggataccactatcctaattagactatttccgtcactcctagaaaattccttcatgtctctttccagccaggccccatatcccacaatcattgttatgatttctgtcacaataagttgattttgcctgattttgaatttcatgcaaacagaccatatggtgtgttgagaatgtatacatttaattagttcttttcaaaaaatagttcttgatggatgtgtaaataccaaactgtacttcttaaaacagaaagatccaaagctgatgtgaaaattgtatagaataaaaacaataagtctttcaaaagaataaaattggaccctttgccttagactatatataacaattagctcataatctatcatagacctaagtgtgtaagagcttaaacaaagctataaaactctttttttttcttttttcttcctttttttttttttttgagatggagtcttgccctgtcacccaggctggagtgcagtggtgcaatcttggctcactgcagcctccgcctcctgggttcatgtgattctcctgccttagcctcctgagcagctgggatcacaggcactcatcaccacatctggctgatttttgtattttcaccacattggccaggctggtctcgaactcctgacctcaaatgatccactcgcctcggccgtccgaagtgctgggattacaggtgtgagccactgtacctggctataaaactcttaaaagaaaacagaggaaaagtttggcactgcatttggtaattattccttggatatgacaccaaaagcataggcaacaaaagaaaggacagacaaattggagtacgtcaaagttttaaaaacttttgagcatcaaaggagactatcgagagagtgaaaaggtataacccacagaataggagaaaatatttgcaaatcatatatctgataggggattaatatctatataaaacactcctatcaacagcaaaacaaataacctaattaaaaaaaatggcaaaggacttgaataaacatttttccaaagaagatatatacatggccaataagcacatgaaaaggtactcaacagcactgatcattagagaaatgcaaatttcacaatgagtatgttatcacttcacacccagtattagtacagctgatatttaatattaagaaaaacccagaaaataccaagtgttgtcaaggatatggagaaattggaagcttgcgtcctgttggtgggaatgtgaaatggtgcagccactgtgagaagcagtatgatagttctcaaaaaattaaacatagaattaccatatactccagcagtcccacttctcggaatgtaccccaagacgtaaaagcaacaattcgaccagatatttgtaaacccctattcagagcagcatttttcacaatactcaaaagttggaaacagtcgagtgtttatccatgggtgagtggataaacagttatgctgtatacattccgtggccttaaaacggaatgaaacatgatacacaccacaacatggatgaaccttgaatacgttatgctaactcagacacaaaataagccagacacaaaggaacaaatattgtgtgattctgcctatgtgagatagcaagactaaccaaattcatagagtcagaaagtgtaatggtgcttgccgggggttgggatgggggccggggggttgggatgggggccgggggttgggatggggaacagaatgtggggttgttatttccagggcacagagtttccatttgggatgatgaaatcctataaaaggatggtggtgatggttggccaacagtgtgaatgtacttatgcatcattgaactgtatacttcaaatggttaaaatggtcaattttgtgtatattttagcacaattaaaaaaggtctttagacatggaagataaggagaaaggtgctcattcttttacacagcaaaatagtagcatgttagaattcagtagtggggagttttcaccacacttgaatacgtctctgataagtttaggacaatgccaagtatttcttttgttcatagattcttttcctccaaaaggaggaacaaactgataatgtaagtagattgagctattcagagacaccaggtctgtgatagaaactggggcgtgttttagtatcataacttcaaagctcacatcaaggaggttctaatatctgttccagtgtttttctatgctttcctagagatagaactggactggactatagtttagctcaaggcaagcagctcttaacgtttccattgactgtggtgtgtgatttctatacgtatttcaggaggttcagtcaacagacattcaccgagctcttagtactggacaggcatgtggaatacagtgatgaactgaactagcaagggcctgtcctgtgcagtggactgtccagtggtgtggtggtgttcatggtcaaatgagtttgagaaatcttggatgtaaaggtggacaagtttccaaactttttaaaggatttcacatatcctttaatgtgatgatatggtatgttttctttttatagtatatttgttttttaaacttttttaaattatagaactcatttctgtgtgatattctatagaattagtgtcccttgtaggacccatagggaaattagtgacccttagggaaatgctggcataaagttctgtctgttagaggttcaccaacctacaggacacttgtttcccttgggaggagatcataatgaaggcttcctcctagttctgtcctgaatgccctgatggcttgtgaggagagggacagtcgctcagacaccagaactcagaagagctatggcctggagtgtcctaggtgaaaggcctgggaagtgattggagcacctggtcttgtagtcagggacttggcctttgagctgagtctcttttctcggaaggacacctcctggggtgtcccctcctgccttgtgtgggtgcttgagtttcccagggccacctctttttgggaggatgtggactggggtggaggcaaaatctttatggtaaaagtggaaaattgtgaaataatttagacatatagaaaagtacagaagcaaatataacagacacacttgtgtaattacagatacagtatatacaggtgtatacacacacacacacacacacccacatacacacagtatatataggtataaaaataacatgttaccctatttgcttcacatctttctttttataaaggagcaaagcatggctgaagccacgccccataatccccaattcttttcaatgcacgtttctatacttttgctacatgtgtgtttataaacagtatacactaatatcttacgtattcaaattttatacaaatgatatgatactgcattaactttttgttgctttctttttaaactcaacattgtagtttttagttttgtaccattttgatatgtggcgtcttactccttttttactactgtgtagatttaattgtgtgcctatagcaaagttaacttttcccatttaccttctgtcttagagttagattttgtcctcttctgtcaattgtagtagacaggactgcattgaatatccttcctggaacatgtgtgtttcatggttatatacttaacaaggcgcatggccgggtcatggggtcagtgtacctttaaacctagtaagaaactgctctctaaacttctttaggccaggctcagtagctcatgcctctaatcccaccagtttgggagcccaaggcaggtggatcacctgaggtcaggagttcgagaccagcctgaccaatatgatgaaacccatctctactaaaaatatataaattagctggtcgtggtggcccgctcctgtaatcccagctactcaggaggctgagacaggagaatcacctgaacccaggaggcagaggttacagtgagccgagaccacaccactgcactccagcctgggcaacaagagcaaaactgcgtctcaaaaaaaaaaaaaaaaaaaaaaaagaggacacagtggctcacgcctgtaatctcagcactctgggaggccaaggcaggtggatcacgaggtcaagagatcgataccatcctggcctacatggtgaaaccccgtctctactgaaaatacaaaaattagcctggcgtggtggcatgcacctataatcccagctactcgggaggctgaagcaggagaatcacttgaacctgggaggcggaggttgcagtgagctgagatcgtgccactgcactccagcctgacgacagagcgagactccacctcaaacaaaacaaaaacaaacttctttagaaggaaaaagggggagagggtaacctttgatcatttcactcattttggaggatgagcaaaaagttcagggtatggtgaaatgaaaaatgagtcctgaccctgcatatttaacgtgatacagaaatgtgaaaggtagtacttgcgttctttattgggataattttctaaaataaatatgtaagtgaatcatttttagctataaattttttgttgttgtgtgtgttcatgtcttaaaggtcttctttatttagaaatgagtgaagcaaattcttcttttgctgctgctactgctgctgctgctgctgctgctgctgcttcttcttcttcttcttcttcttcttcttcttcttcttcttcttcttcttcttattattattattattattattattatttgagacagagtcttgccctgtcgcccaggctggagtgcactggagcgatctcagctcactgtaacctccacctcccaggttcaagcgattttcctgcctcagcctccctagtagctgggattgcaggtgtgtgccaccacgcctggctaatttttgtatttttagtagagacggggttttgtcatgttgcccaggctggtttggaactcctgacctcagttgatctgcctaccttggcctcccaaagtgctgggattataagctttagccactgcacccagccagattcttatttttaaataacaaatggaaatgttctgatctgaggcatttttttttgagatctccatttagttcagttttgcaggttttaaaaaatatatatatatatagttagaactgtgttcgaggcaaagcatgcactggacagtcaggacttccatgggccagcagtttttggccaaggacaccgtgctgctgttagtgtaccattcagtggctgtagatgaagctgaacacgtgtgtcagatttgggtagttcaagagatttccatattataatgtgttccttgattcgttaaaatttttcatataataatagcttgcttaataatcattcaacagtacttatcattcaacagatgtttgttgacgctcagatccttttccaggagcttatattctagtgatgaggacagatagtaaacacgtgaacacgtagttaagtgtttcactacataactaaatcagtctcccctgtgataagatcaggttggtcaaggcacgagaatgaccatggttagggttagactggggagggagggccgcccgagctaccagtgctctatgtctccagctcccagcaactgctgactagcgctcagtaactgttggttgcatgtcacttgcatgcaaccgtctggttatatgagttatcctgcatatggttaagaatgaaacgacttaaaaactctcagcaatcagaatagggtttgcaaagcttgggacagtgaagctcaggtgctttcctcacgcatcggtcctttgggccctccttgtgtgggcagtgtgtgtgggtgtcttggtcctcagcatattagaagcctaactgggttcaggtgggggttgagcttgagcggtgagcagtgccagaatgccctgatggcctgtgaggagagggacagccgcccagacgccagaactcaaaaggagctgtggtctgcagcatccagcagaaggctctggggccttccatgtcctttggggcaggctgttgatttgtgtttcataatactattcagtttcagaagtctgaacagcatatagtagatctttcaaagccttgcatctgaatgcattgacaaaaaaacaataatgatcattaaagaattagattttaagcagggtgcggtgactcacatctgtaatcccagcactttgggaggctgaggtgggcggatcacctgaggtcgggagtttgagaccagcctgaccaacatggagaaaccctgtctctactaaaaacacaaaattagccgggtgtggtggctcatgactgtaatcccagctacttgggaggctgaggcaggagaatcgtttgaacccaggaggtggaggttgtggcgagccaagatcgcgccattgcactccagcttgggcaacaagagcaaaattctgtctcaaacaagcaaacaaagagttagactttagcttcagtcagctgggatattctatcgaggaattggtttttaaaggtaacatttaggaaataattaatattttacagagagcactacaacttctagtttaataagtcataatggcacctgtatagacttgcaggtgggactgggcagggcatctatatgacttaggaaggcagtcctgtttgacagttggagatgtaaggcagagtcatgtgactgaccgtattcacacaactcacgtgcaaagggaattggacttagagtccatgtatttcaaacccaaagattctttgggtaaactagagttgagcaatccgtcccatcatggctcccattgaaggacagctgaccgggtccagttggttggcactgggccccaggtctcagggagagcccctctgtgctgttacaggtttcctcagcccaggcttacagaaggtggggtgccagcaaagttggtcctaaatggatgaatgagccgtgtgtctaaaaggatagcaaattggttttaatcgtgaaggagcatatttgagggcacccaggtctcggtttgctcagtcgtgtaggtggttgctccagtgaagatttcttagctgcgcccacctatcctcctcgccccacaccctgcagccaaacttcctggagctggactaggtagtaaaaaattctagtcagcttgtggctgctctagtgttagtaggttcttgcaatctgtcctgttgttgtgttgcttagaaaacagcgccccctccccaaacaacacttccatattgtgtgtgagggcttctgtaaccagaaagtcaacatattaaagcgcaattcataggggagttgctggctgtgttgactgagctttacagtcattttaacactggcagaagtgttatcctaactgctttaaatcaaactgcaaagatgcttgtgtgaaatatagtattagatatcaaatcaaacatatgggtgttgaacggaaggatgtgtgttgtagtggtatatggtattctagcatgtggagttgtattttatggaaattcgttggcttggcttatggcagggacataacattcattatgagatatcaagctgtaaaataaataaaagcaaaaaattcaactgtgctgttaaatggcttgcaatgcagacttttctgctccaacaacttaggctctgtgtgatgagaggcattgtgagccgttatggtcacatttaatctcatcctctttggtagatcttgaaaataatctggattggattgaaagaaatataggaactttaactttttcattttttccccttttaccccattgtatatgttaggaattactgtgctgatttttcttagaggctaaatgttttactcttttcatcttttaccatttcatctttttcctcattcagtatttctatagtggatttgggttttaagtgtgtatctggcactcattaatttcttaagtgtgtgtgcttatggggctcaagttcttgaagttctccagtggaccatattgtggtatgaaacaaaatgactttgccattcttgtctctagagtgctttttgctgtcctgatatcttgtttttcttttcctttcctgctctctcttgaaattacagaaaaaggcaatagatttctcattaagaaaatattcaaaaatactatccatggtatatttattgcatgaggaaggattttcctgtaaacaatgctttcaggcatttttaggctgatgtaaattagagatggagaagattgattgaggccatttttgtctatacctctggtatttgcactgtagtacaccttgctttacattgttacctgttttatcaactaagaaaatgccatccttagcaaaaatagtaaataaaattgataatttaactggtatatatgtgctgtaaatgccgttggtatattctgactttttcattctgaacttagaaacaaacatacacaagaaagcacccaaaccacaggccttctgtaaagtattagtgagttaatttggactgtttgagttcactttttcactgttgtgtgggaatggatttcatatcatgcttctctttcttagtagaggctattttttagtctcagtatttagcacttcctcccctctccacctttatgatattatcaatagtttctatctgatagaatatgatggtttttaaaggcaaagcagattgccttttgacttcatttatagtatgtgaatagaaagcagcgtgtcgatttgtttaaggaagagaggattagaaatattgagtttagttgcttagcagagaacccccttcatgttgctgaattgaaaccatatttgatttcatttaattgcacattttgactttctcatttgctttgcttgactttttgacagatgccacctcagtatggacagcaaggtgtgagtggttactgccagcagggccaacagccatattacagccagcagccgcagcccccgcacctcccaccccaggcgcagtatctgccgtcccagtcccagcagaggtaccagccgcagcaggtgagcacagtgcactgccccgcagggccctgttttctccaccaaggcagacccggctctgaatcatcttcctgtcctttattaaaaattatgttctggtggaaaaaaaattagttttgagaaaatgcataactgtaacctaatctaactccatctctccctccgtcttttccccttttgagattggagggtgagaagaatgactggtttaatagctgcttgcattactggttagtggcagcagaaagtgtcagtcattgcttgttccctgtcatttgtgttctgaacctttcaagaaagcactctgccactttgttaaggcttattcaggagaaggattttatcaatcatttaatccttctagttggcacgtgcatggtatttttatcttgacctttgttttgttttgttttaatggtaagtgctactttgtgaaaacattgttgcctttgactgtgttattctatttaaactagcttataagtagatattcacttcagttgcagtatattaaaatactaattggaatcatgtactttaaatatatcaagcagtttctagtttaaattagtctcattaaatactcctttaggttactgggttatatatttcagcttacagaatttgtggaaaaatagtatatatgttatttgataaaatgattcagtttccttatgttttagagactgtcactcatgagtgacatgaaaagaagtagtgagtgagggactcttactctgaatccagataaaatgttcgtagcacatccaatcataaacatcaaaatataattttccattttaatacttccttccttctcttttgtgtggtggaggtggcaaagagaaggtgaacacatgtagcatcgactttttcctctttaaaggacttcttttgtggcttgaatagatcgtggatattaagcaaaataaataaatttacggagcttaattttaatcagtttggctggtttcttacatattttcttgggtttgttggagtccctttccgtatgacttactagagaattctaaagagagtttatgatttgaagcaaaacatgttaaaacaacagctaggattcgagacccagtacaatcttgtttttacatacatgtatttaaaagcttgaacccgggaggcggaggttgcagtgagcggagaccacatcactgcactccagccttgcaacagagtgagactctgtctcaaaaaaaaaaaaaaaaaaaaaaaaaaagtaacatctgtggggtttgtagcagtaggaatgtacatcatttcatagttacctggtcaagtcttttattaaagtgtatgaaaattttaaaacactttaatataatttctttttagatgagcaaggctggtatctggagttttgataaagttataacctttttcaaggggctttcagagccttattgaacttatctgtagacacagagtgttttgtcatgtcatcaaaatttaaggagtcaatagataaattatattactcatttgactgtagtgtgctgaaatgaatctctgatcataaaaccgatttgattaatgattctaaatgcctgtcattttcttcaagaccaagctcaaaatttacttcctttaaaaattattcactgatgacttccagcacatggcaattagttatttaatatctttcatatttaaatatttaaagcatactacaagtaaaatcttattttaatgaatattattttaatgtgcttagtttcagtctatcttatgctttgattattgctatcattttattgatttgaatacaataaattatatggtaaatactctataaccatgactttttaaagtaattgtaataatttttgtatattctgaataaaaccaaacattgctcaaaatacattggaaattttttcttgggtttgtactccctagctataaaatgtctgagttatattcattgtggggcagagaggtgaaagttggagacatttgagtggcctaatcagatggtctggtttgacaggaacagtcctggattttagggagttggatgggagatagatttggaaagtttctcaaaaaagtgataacttgcattatagatatatttagcacctccaaaacctaagtaatccccctaaatctatcctgaaacaaagtaaaaattaccattaaagtattatcaaaatcaagctaaatcttaataacactgaattcatatacctttaaaaacttaagaagctcaaccatatttaaccagctagtatttcataacgaccagaacatttctttatgcagtctttccttttgttttcaaatgtggtttatgtaatctcttgcttttgtataaggcaggcagttagcaagtattagtagtacttggtgtcttgttaatgcgattgatacagatggtataattttagggttccatcaagatacctgactttgtgtcttcaatatttttcatatgtttaatgttttaactaatcaatacatttattggtttgaaaaaataaaaagtacaaggaagggattccgagaaaagtctcttcccgtcttagttccctctgcccatgtcaccacccccgttcttgactggataaccatttatagtttattgtatgtttttctagagtttctttatatcaagaagcacaataccatacttttatttttaccctatttttacacaaatgatggtgtatatagtatatactacatgccttcttccatatttttttcctcatccccttcttttactcacttaaatatattttctagagatctttccaaaggagcacatacagcaatccctcattcatttttatagcttcattacattttatggacataccatgatatatttaaccagttctttttgatggacatttagattagttctggttatttgaattgaaacaatgatgccatgctaaactttgtgtatgtgtcataagtgggcagtaatatctgcaggatgaattctggaagccacagtgctgggcaaagggtgtgtgcatctgcattcccagtgggtattgcaggttgtagccaattcacactcccatctgcacgtgagaggactcttcctacatatgtgccagtagcatggctttacaaagcttctggatttttgccaatctggtacagattgagcaccctaaatcccaatgtctgaaatatgaaatgctccaaaatctgaaactttctggatgccaacatgacaccacaagtggaaaattccatatttgacctcatgtgatggatcacagtcagaacacatgtaaaacattgtttcagtcacacaagtattttaaaacattgtataaaattgccttcaggccatatatgtaaggcacgtttgaaacataatgaatttcatgtttagtcttgggttccatctctaagatatctcatttgtgtatatgcaaatatgccaaaatctgaaatacttctttttctaagcatatagttttagtttacatttatcttgttatgagtaatgttgagtgttgtcttgtgtatttaaaggcatttgtgtttcctttttcctgaactataaatttatatatattttgaattttctctcttcagttgttggtctttaaaaattatttttaaaatcctttgtatattagggagactgggcctttgtctgtaatatgagttattaactccagaggactggaatcaatagaatagaataatagaatagaatcaattgtgctcacatatgcacgcacacacacacacacacacacacacacacacagatttattataaggaattggctcatatgcttatggagttttgcatttccgaaacctgcagtatgggctggcaggtggtaagccgatggtctgatgaagtcaaagacagcttgctggagaattccttcttgcttaggtggggctggtcttttgattatagttaggacttcaaactaaatggataaggcccacccacattatggaaaacaatctgttattctcagagtctccgttgaaattgttaattccatttacagtaccttccaagatcacatgtaaaatcaaccattgcagctacctttccctgatgccactaaaatcattaactgaatttccttaggtatatggtgtttggggtcattttgggatttctgttattctccattggctcttctatgaatgcattagtattgtactgtttctctattatcttttagtatctgatggggtagtatatcctcattatccttctttttcagttgttggttttctttttccttttgctattcgtatgtgcttattttttcctataaactttttctttttttatcacgctattttctaagaattttatcttttgttattgttataatgggatcttctgtgaaacagggtacttagaaaagaataaagataagacacacagaagcactttacttgaatagctttttcctttttggagcccactgaccaaagatgagaaatatccctgtaataaaaagatgtgtttgtttagcttaggtggctgcaggccagggaggatgcagtcctgaggagccccaggagcactgtggaaagggggaggtggggctgtagtagggttggggtgtgtgttagatgactcttaagagggagtggcatcatgaggaggggtggtcctcaactggctgctctcaagaagctgggggtacttttgtgattaggtattttaatttttatctaggagacaggaggattgaagtggggcagggttgtcattggtaaagaagcaccagccacctcatgcctgtaatcccagcactttgggaggccgaggtgggtggatcacctgaggtcgggagttcgagaccagcctgaccaacatggagaaaccctgtctctactaaaaatacaaaattagctgggcgtggaggcgcgtctgtaatcccagctactcgggaggctgaggcagaagaatcgcttgaacccgggaggcagaggttgtgaggaactgagatcgtgccattgcactctagcctgggcaacaagagcgaaactccatctccaaaaaaaaaaaaaaaaaaaaaaaaaaaagcaccagccacttagaaaaagaagcggggatgtttgtcatttttgtcatcagcaagtggccttgggcacctgttgtttcgggcactgttgctgtgctgtagaaaccatgcagtccgctggctcttctgcctggttttccaatgcttgcctttgcccatttccactccaccatccctgcctctcctgcatgggatagctttccatctctccatttgttgaggtacttttcagtttcttttataacattcttcaaaaagagctgctgtattacttttgttaggattattcttacataccttattttttgttgctattgtaaatggtatcctttaaaaaattacattttctcattgttactggtgtatacaaatgtaacagactttgtatattaactttgtgtgtgtgtccagccaccttttaaattcttgctaattctgctaattctagtgatttgtgaagtctcaggttttttaattaaaataatactttaaaaaatcactgccttcctgcttttttgcctttctgcagactggctcccctgtatgcattctttgaaacggctggctgttcctgtgttatccctgattaaatgaaggcttccagcattttgtcatttaatacaatgtttcccctttcttttctttcttttctcttttccctttctttttgtagctgtccactgttgggctaaggaagttcccttcttttctagtttgcgaagagattttttcatgagtggatactgaattttatcttccgtcttttttgaatctattgagatgatcactttgtatgtattgagatgatcactttgtttttacttataatctgtttttgaggtaaattaccttttaagtatcaaatgaaactcacattctataataaacatagcctcatgatatattgtcttttttattcatcactggattcagtttactaacatttgttttaggtttcttgaatcagaaattcatgaattagactgaactgtaattatccttgttaggttttggtatctgtacttttcgagctttgaaaatgaattggaggccaggcgtggtggctcatgcctgtaattctatcactttgggagggcagatcacctgagatcaggagtttgagaccagcctggtcaacatggtgaaatcccatctctactaaaaatgcaaaaaaaaaaaaaaaattagccaggcatgttggcacacatctgttatcccagctacttgggaggctgaggcacgagaattgcttgaacctgggaggcagaggttgtagtgagtcgaggtcgcgccactgcactgcagcctgggcgacagagcaagactgtctcaaaaaaaaaaaaaaaaaaagaattgaagatgagtcccttttttaatttactgaaagaatttgtgttgttatctgttctctgaatgtttagtaaaactgtttataaagctataaagggttgtatagctctttatctttaccttttgtcttacccctgatttttcaacttttttagtagagatgttgaggtcttgctctactgcccaggctggtctctaactcttggcctcaagtgatcctcctaccttggcctcccaaagtgctgggattacaggcatgaactactgtgcccagccatttaaaatttttgatttcatttcttttgtcaatataggcatattcaagttaaaaatttcttcttgtgtgagtattgctatatatatattcctatgtataggaatttgtccatttcatataatttttcaactttattaacataaagttcgtaatagcctttattactttaatctctgtaccatccagagttaaggcattttaattcataatggtttttcttcttttattcttgataaaaccatttccaaagtgacttggtctttattgtctgtattgtgtgtccttgtaaacaaacttaatgaaattcttctctcaccttgattacgtcttgctttctactttattgatgtttattttgctgttcttcccccccgcccccactcaagtgaatgcttactttatttgaacattttttgtttgatgaagctaaatatgagactaaaattttttctcttaagtactgctttggctgaatctttcaacttttgatatgtatcatttttgttctcttttagttctaagaaatttcttgtttttctaaattgcttatttttttttgaagacatttttattgaggcctgggtttgcattctgtttcctcagaaggattgattggtctttgcttttgccaggtgcctatgggtaccagttatcttgaacaatgttttgtgtttgattttgtgaaagttttattacaagaagaatatacagatacacagaatgacataatgagcactcctatgccctcacgtagttttaatattaccaatattttcccatgtctgctgccctgtctcatcttttcctcctcttccgactttcttcaaagtattttaagtcacagatacatttcttctcaaaatcattctgtatgtgtgtataaaacgtaagggcacttctttttttttcttttttctttctcttttttttttttttttttttgagacagagcctcgctctgtcgcccaggctggagtgcagtggtgcaatcttggctcactgcggcatctgcctcctgaattcaagcaattctcctgcctcagccctgtgagtagctgggattacaggcgtgcacctccacacctggctaatttttgtatttttagtagaaacggggtttcaccatgttggccaggctggtcttgaactcctgaccttgtgatccacctgcctcggcctcccagagtgctggaattacaggcgtgagtcaccgcatccggacaagggcgtttcttatataacagcagctctgttaccacatcttattaaattaaatataattccacttgtctacaaacctagccatgttcagatagccccagttgtcttcagaatacccttctgtatcattcgtttcaagcaaaatttaaacaagatttattacattgatttggttctgaagcctttttatctaggacagtttctcctccccaaaatttgtgccttgacctcttgaaaaacctgggtcaactgtcctgtggaatggctttatctgccagttttctcttgatgtggcttaacttgctcatctgtttcctgtacattgcaagttagatccacaggcttgaagataaacattttatttgcagtcgttgaaaatcatgttcccaacatcttaggcctgcccttgttcacaggatgggtctgtgatcctccttttgagcgaagagcctctaggtggttctagcccccacctttcttgtgaccatcagctacagctgaggctgaagagacattgtgatggacagataaagcttccctttgtaccctctccaaattgctcactaactacattggtgagcacaacacatgctggtgaccctaggccactgagtttggggtggttgttacccgtcatttctgactgacttggtctggatgcttcataggcgatgctgtgcgtttattgtatcagattgagcgtaatgtttggttgtcccacaacagtgaagttaagattaattagagggtttaggtgatgatggtctctggggctgttctaaatgaagtatcttcttgaggttttgtagaccacaccattaagtgttaattttgaccagataccctggtgatggttagcttgtggttgctatttcttaaaggagccacttattcctgctacctctgcatatcaagttcaagacaggtatttctcttttctgtttagtggggttgcaagctcttaaatgatgggtatagcccttcttggtccttaatttaactgagaggtgttgtcttgtattttactcccttttggcaggccctggacttcctctccttttccctgttctcgaatagttgtcaaagggaaagttagaatctatagcaaaagttggcttctattgctctcttggtttctctgttctcggtctgctctctgggtgttcttcatgttactcacatttatggcaagtctgggattcatttaaaaaggattagaaaacgcattttatccagtattttgggtttttcaatcaatagctatttagagcatctaatctgccatactgctggaactggtagtttcatgttttctagttgttcctttggtatcctttatacaattggaaaccatacaaatatgtaatgtttatgatagatcatttagaacatacagataataccttctcattgtttgaatcaaacttttctagtgtctcctttattcttttaaaataaagttcttaggtaatatgagctctccccacacaaaattttaaacaaaattagaataaggcactaactatatatggaaaatgaaaagaaagaagtatataataaagtattgtatgcttaattaaacaaatatttaggcatactactttagaagacttgtgaaatagatgcttgatgtatatgtgtgatcactgtgaacttgacagctacaaaatgagattgatataggaatgttgcattggcaactcagatgtctccagcagggttgtcagtggtgatgtcatcttttgaaatgatgagcaactgttggcaaagttctgagcaaaacaaagtataatcttccctcaatatacgtgatggttttgtttctggaaaatttattatgtcataagatgattttaagaacaccttgttcttccttgcaaaatggagttgggttctagactcagctaaataattagtttttttttttttttttttttgctttgtttttaaatatacccaaactttggcacttttgaaagtagtgtcggctgtggcatggtgatcttttccatcagtcactcttacacattgcaggataatctagcattcctaccctatagccactgtttaaatgcatttctgtgtccttgtgacaactaactactccgttgaaattttgtcactacatgtgttatatatgtccttaattttcctgaaattcatatgtaaagtgagttccctatgtataaaatttcaaacatgagtatgattccctgaatgtaatggaaagaggtaggaaaggacagaaagctgcctataacacatttgtgtttctcttaagtaaatgctcaggcacttctccattagaaggcttgtgagagagtcagaggcttgtgcctgggtctgtgggagccatggactccacaggtgcaaacgaggctgctacagatgtgtgggatgaacagctcaaaaccacgagcaggcatagaatccatgggatcaatgaccacacaacagtaattatagaaatgaaagtatagaagaccactttaaataacatgctcacagagttgttagaaaaggtaagttaccccaaagtctggaaatgttataaatttgtaaataaaatacaaatacatagtaaaaactggtaagaaagtaaagatttcttttcttttgctttatttgtattttctaaattatctacataaacatgtaatgcatatataatattcttaaatgttgtgtaaaggattccacgttacccattatacaatgtaaggaattacccattccggtggcagactaggtgctctcaatgtctctattgatcaaaatatctaaaatgctggctcagttcttcaaactaaatgaaacagtgaatcaaacctctttttttttttttttttgtttaactgtttcttatgcccctcctgtcatccctttcttccttacccaactaaaattccaagcccatcattatactcgccctcacgctcctgcatgtactcttaaatactcaccagccccatcttattaaacctatttatgcaagcctgatgaaatccacttttgtgcccactccaggtgagtgggatggggaaagagggagggaagaccctgctatttatttgagttggtgaccactgatgttagatcatccttgccttgtagctttgcatttccctaaggctatttcagatctccctctgtcttcaaacccaaaaggcttaagccctgcccctcactctgagctagtgaggctgcttcctgtttcattgaagaaatcaacacaagcaatcaggagaacttagaggtaccagccagcctgtgtctgcatatcatgtctgccttctgtgatgtacacactctgccagaaatctccttgttcctctggaaggctgctctgtgcccttggtccactcaagttcttggtttttccccacaccatccatttctctgtccttcccattggcatttaaacatgccatcatttctcccaccccaaacaaaacaaaacaaaaacgcctttcttgaccgaaaccacaagcctgtttttctcttttcttgtattccccatttgctggtatcccttgaatttactctgtctaggcttttatttcaactattctattgaaatggctcttttcatactttcttttttttttttttcacttgctttgtaaattgagaggtaaaattgtatgtatttactgtgtacaatgtgatgttttgaagtatatatactacattgtagagtgagtacatctagctaattaacatatacattacctcacatagttaccattttcgtggtaggaacgctttacatccactcaacatttttctttttctttttttttttttttttgagacagagtatcgccctgtcactcaggctggagtgcagtggcgcgatctgggctcactgcaacctctgcctcccgggttcaagcaattctcctgcctcagcctcttgagtagctagaactacaggcacgcgccaccatgcctggcaaatttttttatatttttagtagagacagggtttcaccatattggccaggctggtcttgaactcctgaccttgtgatctgcctgcctcagcctcccaaagttctaggattacaggcatgagccacctcacctggcaacatttttcaagaatacaatatattattaactacagtcaccatgttgtacaacagatctcttgaacttattcttcccatctaactgaaattttgtatctttgatcgacatcttcccaacttccagcccaccccagcccgtggtgcccccatcccactctctactttccaacaaccagcccgccccagcccgtgagccaccatcctactatccacttcccaactcccagcccatgccagcccatggtacccccattccactctccactccccaacaaccagtccatcccagcccgtgaaccaccatcccactctccacttcccaacaaccagccaaccccagcccatgagccaccatcccactcttcacttcccagcaaccagcccatcccagcccccggtgatcccattccactctccactccccaacgaccagcccatcccagcccatggtgcccccattctactctccactccccaactcccagcccttcccagcccgtggtgcccccattccactctctactcccgaactgccagccccaccccagcctgtggtgcccccattccactctccactccccaactcccagcccatggtgccccctttccactctccactcccgaactgccagcgccaccccagcctgtggtgcccccattccactctactccccagctcccagcccttcccagcccgtggtgcccccattccactctccacttctgagattacctttcctagaggccacatttgagtgagatcatgcggtatgaaacagctcttttcaaagcctccagtgttctgttattcagcctgatgggtgatagtcattccttccatccttcgcctgtcattaggattccatgcagctgacggtatcttcctcctcggagcacctgtcttgcttggttcctgggacgccaccctctcctggctctcttcctactttgtggccgctccttgcctttccttgctagattttctttatctttctggcctccaaatactggcccatgaccagggctcagtgttggcccctctttttttgtggctctacccaccttacctgtatgatttcttttactttcaaagctttacgtatctggagacttgtgactttcatatgtacttttgcaacttggatctgtcttgtcctttctacatctatgtatgtccagctcctgcaggtaatcactaatttgaatgcccaacaggctttggaaaatcaacatatccaaagcgggcctctggccacccagccctttatccacaaacctgccctgtctatattttcccccatcccaacaatatgtatgtcaatccatcctttctgaccctttgaaatctttggctcttctctatcaagcccactttttttttctttttttccaaataatgtgtgtggtttcaccttaagaaaataagatttatgagtggaaggactttgttttgtcattatgtccccagcacctaggtcaatgcctgcacaaagtagaaacttagtaaacatggtgaaaattgttgatttaatcattcaaaaaatcttttttatttgctgaaacatagtaaaacatactttacagtgttgaagaaggtaaatgtttactgctgggtatttaaattttgtgatttcttttggaattgcagatagtgctttgtggaatgcttttatagctggttcctttgtgcagtatagatgcatgtatgtgagcaaacaggctttcttctttgatagaattgctgggcaaaagaacaggcacattttaggccaggcgcagtggctcatgcctgtaatcccagccctttgggaagctgaggtgggtggatcacctgaggtcagaagttcgagaccagcctggccaacatggtgaaaccctgtctctactaaaaatataaaaaattagacaggtgtggtcgcgcatgcctgtagtctcagctactcaggaggctgagggaggagaatcgcttgaacccaggaggcagaggtcgcagtgagctgagatcgtgccactgcactgcagcctcggtgacagagcaagactctgtctcaaaaaaaattaaaaaaaaaaaaagcacattttaaagatttggttttgggcgggctcagtggctcatgcctgaaatcccagcactttgggaggcccaggcgggcagatcacttgaggccaggcgttcaagactagcctggccaacatggtgaaaccctgtctctactaaaaatacaaaaattagctagatgtggtggtgcatacctgtagttgcagctacttgggaggctgaggcagggggatcacttgaacctgggaggcagaggttgtaatgagccaagattgcaccactgcactccagtctgggtggacacagcaagactccgtctcaaaaaaaaaaaagccccacctcttttttaaccaaattcctctctagaaggttttttaacaaattacgcgccccacccccccagctcactttcctacattttaatatatattttccagtggttcttattttaagttttatttttagtgaggatttaactgttttctgagcaccgacagaattaaagagccctcacagaatttggaattaggatggatctaggtgatgtgttacaatgatggaacagatcgtggaaattcgattgtatcaggaagaagtacacagttggacattggtaattttttttgatttactgctgacactgcggctccatgaattccacaacttcttgttgtttacatttttgttaccattaccatttcttgtctctgctgctctttttagggggcagaattagaactggagtgagtaggtctggtttattcttcctgttgtagatagaggataactaggacatcagaggttcacactgtgcgttcatcagacatcttatttacccaacactcgtcatttccttcttttaaaaagcatctatttttatggcctttaaaaaaagctatttgaagaagttgcttccattttaaagtatttttacatcctagcttacttcctcagacttcattaaccgagatttaatacttttatatagaaggggaaagctccttcaatgctgtggtttagtttttgttttgttttgctctaacgtttctgcttgccttatgtttccccgttgtcaggtctcgatgcatcacatgcaggtctgcttcccggtcccctcttagcaagctctcatgacctttctctctcctcctagtacctttagactcagaatcgttttccttttacctctgactcctgttctgcttcagacttactctcctaagatactggaagagacctcctttcctgttaaggcacacatttctccaggaaccttcacccatcgtctcctggcagatgttgtgtgttaagtgtcaaggccagtgttccaacaatcaggtaactcaaagagagttgcctggccgcagacagggggctgtctgtcagtaccctttcttgtgaccgaggtcttctgctggtctggaacagttggcatcctcgcacaaccctgtctgttttcatggctttaagggacactgttgtgccctcatagccagaaaaacctttttcttttcttagagaagagttgtagcaagtaaccctatttaagaagtcaccattttttttttagagagtatggatctttttaaaaaaccttagtgtaaagcagcaacataatttcaaacttggcttttatacgtatagtttctcttcaagttgatatagttgtttcggattcttaagagaaataatgggtattatgaaagtgtacttatttacctcagggtctgttggacaagcaaaacataaaccattttatgagcccctttgggcttgggactgttttgcatgtgggaatctagtgttgagtcagacgttgttgctgacctaaaggagcccctagttgaacaggagggttgacggtgccgtgggaggggtgtgtttcaagctgtgattctagtgttgtgaggcttaggagaagatgttgataaaagtgtctcagaggaagtctggaagaatgaggaagactttgctggtgagagaagaagtgatcctgggatagggccagttccttgttagtgaaaatagaggggatgcccattcctgagagatactgaagtagacaatgaggtcagttaacagtcaaggtcatttagatggagcatattaattatggtgggaactggtgatttatattgcctttgcctcagtgattaaaaatgaaatgaggttatttattgttcaatatcatttaaaacagaaaatagtactagtttagcagttaacttctagcagtagatcacttggtagttggaccaagtggaaatctgagtctacttttatgagagtaggtagatgggtgtttaaatgatattttctaaaatatctttcttcagacatctttttggtcagcaatttttaaaagagatgccgtgaactggaagtacttggcacatgggcaatcatttggaaaagaacaaaatagtactggaacatgggggtaaaataggtttcaattttttaacataaaatatccatcataatccacatagtaagcaaaatctttcaaaggagcttaacttagaaaaaatactttttttaaagctaaaaacatagtgaaatatatttttgatttaaagcttgtaacagcatgccactcaagtcattgaaggaacacagaagtcacattagggacagaggctgtgatccattgtggggtaaacagttccttatattgttgttatttatattatgcaaatctgtttcttatatagaaataagaccaaaatttaatttataagccaatcctgcagattttgggggaaaattaaccttacaaggcctgtggaaagccactgaagtgttcatttcacttattttaagattttattataagagcaaaaaaacaaggacatatatagtttgttgccattaattgcttagtttttggatattaacacagtctattaactcagtaaaaaccagaatatagttaatgttattctttgttttaaaggatattattagtgaagacttgggttatgtttgaattttgaatctttttctttcttcttgctacagttgtctcaggctttgaaccattgctgagggagatttccttttaagtttgaagagcttgtaagcatccgaggagacaacttctgggtcacttagtggctgagcaaggcctattcctagactctgattgttgacttggggcttctaaccttgtgttggggccggttttgggagcacagaggtggggttagataggctgcaggagccaccagcctgcctgcgctcgctctggcaggatgactgatgccaggaggatgggaatgaggactagtgaccttcctctctctgttccctttttctcccttgggggaaaaactagtatagtaaaagctcagcactcgttttgaatataggtgtaatttgctgcgttaacagtttcagtttattgtgtgttttggtggcgttattcctgaaagcttcttaaaataaaaaaagtagaaaaaaagacccattgaagaatgaagaaaaataacattttgagaatgttagaatgtcttttggtatgaatttggttttcttaattgctgtagaaatcagggtgaatctgtagttagttgcaactatgtctgcctgggcctttgcttttccttaatagtagcagaagaaagcaagagaaaaatcctcagattttatacacatcacttctagtatcgaagcatttttggcttttaatggaaaactttcagtgtttttttaatatgttttgaagtataattgggaatttaattgcattggatcataatttgataatgctatgtattcattttcatatttaacatatattttaagttttttttttctttctagtaccagaattaaaaccaggaagtgaggaattatatagtaataatattttcaatactaattttagaaaggggatggaaggctcctcctgagaagagtagccaggaagccaggcaggcctggagtgtgtggccagctgtgtcctggtttgaagcatctcagacactgttgggcagctgcttagcccagtttaactgaaatgtggaggagatcacatcagctgggcatgactgtctaccatggaggcaggagaggaaaaccttagattgttgaagatgtatttcttagttgggcgtgttagcggacatctgtagctccagctgctcaggaggctgaggcaggaggatccctgagcccaggagttcaaggctgcagtgagctctgatcgcaccactgcactccagcctgggtcacagagtgagaccttggctctttaaatgaatgaatgaatgatatatttcatcaaaggctaaagaaaaacttcaaacaccttaagaggagggtttagtctaaagagcaattaagcttcacctccttctctgatcctaacactgctataactaactgtaggtgggtgatccctctctcccgccagaggaggatttatggaattgaaccagatgtcttcacgcatgagtggacattgccttgttctctagtttttagtcctagttccccagactcagcagccagtggaagaagaagcctgctcttctaaaccagaaagttgggtagaactggcgctctccgagcaagcctcctcattgcaccccttcacctccctccccttcagctccctgggcctgacagcccatctgtcttcctctctgataccctgctcctgcccccattggtattgagggatgaagttgggaagagaatgcagtgtgcagttaaaagtatcatcgaggctcattatatattcactaattctctttccttgatatttatattctgacacaagggaaattggggaattatttttttcctggattgtttttttgctactctcagctgctttcatttgtctttaacatgctcatttcaatatgttaaactatgaaaaatgaaataaaacataatttatacataaagttctttcttcatcagtttctttgatttttaaaatttttaattagagtaacaagctctatgtatattgtattccagaggaagattatcttcagatgtttgaaatgtagcattatttttagcatttgctaatgtgggcagtggtcacctttttctttttttctgcaaaagaaagaacagaaccagcttaggtcactgattgattttccccaaagtgctaggcttttgggagaggaatgggtttatgtctctttgcattagcctagggagacagaagaagatggtgtcaggaagtcgggcagggaaggccctttggtatgtatacagctgtggttttcttttctttctctttttcttgttcttttcttttcttttttttttttgacagagtttcactctcgttgcccaggctggagggcagtggtgcaatctcagctcaccacaacctccgcctcccaggttcaagtgattctcctgcctcagcctcctgagtagctgagggattacaggcagtaattaattaattaattagcagggggactccaggaccctggaccccactgttttaccagttgccaaatatttggtgtatcttccttgcttgaaagcagtagttctcatgtctgctttccttatggaagagcagtgggggattaacttcaggatgaatatattagtcaccttgcttggaaagttggaggtgttcattttaacataaagtgggatgaatatatagcttgccctccttggaaagttggaggtgtttaacataaagtgactaaagaaataaataaagtgggtaaataaataaattttattttaatttaattttgatgtaattgatgataatttcagatttctggagtcatctttatgttttttcccaaatggaaatttgactgtttaaaaggtaaaaagtcttctacagtaatagcacttgatgggaaaacacacacacacacacacacacacacacacacacacacacacacacaaaatgtaagggaatctctaaaaaattcacattttctgctatttcttggagaagggggatgcctgtggcctgtctactttcgtagaagattggtaaagttgatactaattggatgctaagttctttttagtatattgtttttctgaaagtctgtactcttagagtggggaagagataatttagtagatcaaatgatccattttaacatcttgtaaaaagttcaaaaagtaatacatatttgtaaaaaaaattcagcagaatccttgtgcttcttgcattttgaaagcattattgatacaatgcaaaacaacagaatcttctttatcttttattgtctttggctgtttcttctgtttctctagctttttttttctttttctttccttcagttattttagctttcattccataggcatttcacagagaaatcagacaacttttgagattaaccccctcagcagttttagggatgaattggcaagacaggcttttgaggcaggatctttctggcactttacttcactctctttggcaaaaagaaggtctgtacctctttatccagcacgcgggttcaggagctctgtctcagcaggtcactgtcatgccacttgcaaccccccatggtattcatctaagtgaagagtgtggataataacgtaaggggtcctgtataggttgcccttttttttttttttttggagatggagtcttgctgtgtcgtccaggctggagtgcagtggtgcaatctcagctcactgcaacctttgcctcccaggttcaagcagttctcctgtctcagcctcccaagtagctggggttacaggtgcatgccaccgtgcccagctattttttgtatttttagtagagatggggtttcaccatgttgaacaggctggtctcgaactcctgaccttaagtgatccgcccgcctcggcctcccaaggtgttgggattacagggtgagtcaccatgcctggcctaggtagctctttagactagagttacttaagcagtctgggcttttattgcatgtttaattcagatactaatggcatatttgcaaattcttaagtaatttttatttgtgtttcagttatttagaaaagtattacaatgttgaatgtggttatttgcagctaatctggttcaaaacatctctatgaaattatgatgttttcagttttggtaaatcccattgttgattatctctgttcttaccctttaatctttctggagtctttgagaatctggtaaaagctacagattctcctcccagacaaatacatgcatcacagagttgctgtattctcaggggagtgttcaaagaccttctactccaggtcaagaattcaggccctagatatgagttatggtcccagtgtggggtaggaagaactgatgttgctagtttctgaaggcctcctgtggccctccaggtctgtggctcgtgtgccggaagtagtctgcttcttggttgggagaagaaggggcttgggttcttggagcaagaatcagccttccaagtgtgagatgccagtgcagggccatgtcattgaaaagctgatgatgatcttctcaagttgttgctttaaccacagtaagacaaataagaccatccctggcccaaggaggataggtgaagggtgggtggacaggtatctacctgggaaattagccattgttaatgttacagcaaaatgccctattacagatgctaggtaatggagtaatatccaaaaccccacattgtaggactcacttaattatcataatttaatgaaaatataacactgtatttaatcaacagtcctcgaaatttatagacaaatctgggaaattcagattcctggaccccatcctccggttgggaattgtcagctgtcaggtagggtccagaagtgcctccttatctggtgggtgggagcatcgttaagtgcacacactctagagaaagaatatcttggttcccatcccttctccaccacttgccaactgagtgaccttggcaggttactcaacctaattttcttcataagtaaaatagtacttactttatggggtcagtgtggaaatcaagagtttattgtatgagtaaagcacttaggagagtacctgatagatggtgtgatgtagaattattagcagctgctgttactaccaacactgtcctcagcatcatggccactggataaagttctattagttgattctctttttttttttttttttaaagacagagtcttgccctgttgcccaggctggagtgcagtggtacaatctcggctcactgcatcctctgccttctcccaggttcaagtgattctcatgcctcagcctcccaagtagctggggttacaggtgtgcgccaccatgcccagctaatttttgtagagacaggtttcaccgcgttggccaggctggtcttaaactgatctcaggcgatcttcctgcctcagcctcccaaagtgctgggattacaggcataatctatggtgcccagactgattctcattcttaaatatgcttttaaaaataacaatagctgacatctgtgaacatttaaatggcaccaggcacagtgctaattgcttgaaggcagtgtgtcatgatcatgaatacaaccttagaaggtaggttcctgtatcttagtagcaggtcccttatacagtcatcccccttgtcagccaggggatgggataagttccaagacccccagtggatgcctgaaagtgtggatagtactgaactctgtgcatactatgcacaaatttctttttcctttacagtttcaaggataaaagattcattctttccctagatcttagcaacctcaggatgtgctatttttttctttgcttattaagtcaagaacttttcacttaaaggaagtagtttacagcttctctttggctgactgattgccagcatcactattctggtgccttggggccattatgaagtaaaattagcgtgatttgaacacaagcactgatactggatctggtaacagctcctaagtgaccagtggatgggaagcgcctgcaacgtggattgcctcacaaagggaggagtcacatccaggcgggcaatttaaaattgtgaattgtttatttctggaattttttccctttaatatttttgaaccacagttgaccatgggtaactgaaatcatggacagcgaaaccgtgggtaagggtggtggggagctactgtatcttggttttatggatgaggaaaggaattatttaggtaataagttatagggagctgagattcttggatgttgtatagatttttaaaaattattagatacattactttttccctacaaaaagtatagagagcagaacatttactgtggctcatttgcctttatgactttattaaaatacattcattattaaaaatcttaactagtctttagtcttgcctatcattatgttgattattttaggaaaattaattttaggcaaccatgtggcttcctttctcattctgagcccactgttagtttaggaagaagtcttatgaaaacttctttcctacgaaagaaggcaaatttaaaagcttgtcttaagttttgaatataaattagcagcctctaggattcttgcttcttaagcttaggggagatggctgctcttggtattgctctgttcttttcttccatatcccctcagggttcctctatactgaagccagggactgcaggtccttgtttacatgggtgtcctgtgccatggtgacattctgtgaattgcaggcgttttgcagtgttgagtcctttgtcagtaagactgagacttatcagtaagaaagcatcatgaagtagcttatacaagcctgtcctttttctagaatggttttttgttgggtatggtgccacacacctgtagtcccagctactcaggaggcttaggagaaaggatccactgagcccaggagtttgagtcacagtgagctatgattgtgccactgcagtccagcttgggcaccacagtgagaccctttctctaaaaaaaagaaaattataaaaaggttttaaaaaagtctggaaataattattcctttgaattgatagaaaataaataatatcctgaatattctttggactcattaataatatatatagtttattagaaggaatatggctttaagcttctaattggcctctgggattagttgcagttaaaaagcatttgcagtttagacatgtgatttttatctaaactaaaagatttttggagcagaggggaagggaaactatcgatgtggactgggaaaaattgaagggatttagtagtcttctgaacagataatgaacagtactcatcatggcacatgcaagagacccattccacccctgttctttgagcaccatgagcctgagatagacaagcaggaggagtgaaggcacatgtgatgcactcgtagtctgcataggccattgccacccagtatggctggtggaataggaaactaagctgtttggagtcatacagctgatgaatagtgaagttggcatttgaatttgggtttgtctgaactcaaagattcaaggtccttagaagagatctgtggctgcataaggcttcttggagctggtgaaataggacaccaggcctttaagaggtggggttaagataaagtcagagtgtgagatttaggctgggagggcaccttcagctgagatcaaaagattgaacaaggatcactgagtcaacaagaagagcaggttttactttgggaacctaggggaaaaatgaaattgttaaggttaatttggttaagatcatggaggggttttgttttgttttgtttaggatagctaagcattaggatttaatagtgcagcaaacatgttaaaaataggtgggggcattatgaaacagaaagattgaaagttctatggttaatgcttaatgtatgttcacaggggaggaggttggaggcatagtttttcagatgaaagccagagtcagtctcagccccactctaggttcatgaagttgcctttcataccattaacttcattcagtttcctttaaaaggaaatttccaaatgtaaacagaagtagataatggtgtaattaatctggcacacgtcactccaccttcatcttgtttcacctctgtctcccccttctcatccccgtatcccctgtcccttttattattttgaagtaaattccagatgttactattttgagaaggagtctctctctgttgcccaggctcgggtgcagtggtgaggtctcggctcactgcaacttcgcctcccaggttcaagtgattctcctgcctcagcttcccgagtagctgggattacaggcactgccaccatgcctggctaattttttgtatttttagtagagacagggtttcaccatgttggccaggctgggctcgaactcctgacgccgtgatccgcctgccttggcctctcaaagcactgagattacaggtgtgagccatcatgcctggcccagatgttgtatcatttcattggtaaatatttcagtatgtgcctttaaaagataaagaactttaaaaaagagacataatacagttatcactattaaaatataatttattcctatcaattatccagtattcaaatttccaataatctcataaatggaatatatattattgtttaatttacattgtggggtagtttgaatcaggatccaaataaagtgttaacaatttgttgttatcttttaattactcttcatttctaggattttcctccatctcctctccttctcgtcctctcacttttcatttttttctgttgccatttatttattgaaactgggacatttgtctagtagagattcccacagcctgggatttcctgattgatttgcaatggtttaacatgttgcttggacctttttatttcctataaattagtggtttgatctgcaggttttgtcaaactcatcattttttgggaggtgggatattttattcctgatctgttttttggtaagcatcaaatgtcttgatccccaccccacccccgcttctggtggcattattgatgctctctgcagtcttaatttccagtatatttttactgcattattttgcagtcatccttttgccataagactgccagtaacaaacagcaaaatgtgttctgtagcacatttaccaggcagagtagctgctaacatgataaatattcttggatgtgtgcccaagttttgttcagttttatgtgtttgtccttatacatttgtttttgtgttgctgtgtctaattctaagtataagctcctagaaaccattcagtcattcacctggcttttatccagtacccatccttgctgggcccttgggaatccaagacgatagcatccccgtcttagaaaaatggtgtccagtttgggatacaccacaaatagttaatatatggcattctaagttctttaagaggagcccatttgaggttggtttgaggtagttgttttggagggtgatagggttaacttctagcaggatcttgaggacagtaaggaggaggaagggcatccacttggactggctgaaaggcaccgaggagcagtggccgcatggcccatgggacccgagcagctgaacaggtgaagtacggttttgccccacaccctggggccggccctgtagaagctgacctggtggccggagggtgcctgaagagctcttctgagcccagactgggacttaaacttccttctgtaggccttcgggaggcattttctgagcacttgtatttgaggaagtcagcagcattgaccgcagtgcaggtgtctgccatcggatcaggaggaaggggatggactgggtgatgatttgggctttggtgatgtgtcagacgtgcacagattgtagaagagataatgagttgtgtggggtggctctgagcaatctcatttgggtgctctccttcggtgaggtgggggcccaagggagaaggaacaggtctgtggggtcatttgggagagtcatttcttgacccgatgagtgcaaggcactctctccagaggtccaaacattaaggatgcagttaaggacctcctgtagagatttgggaatcaccaccaagcagggggccacatggagtccttggggtacagacacttgaggggcccccattcttaaaggacagggagaaagagaagagccggtagaggatccttaaagaacataatctggcaggcgggccccttcacctggcttgccagccagcctgtaggcttctggtaatgcttgatgataaggagtgtggctttgccttcacacctgtggaagagaatttttcattttcgcatttcttacttattcatgttactggaattgatgttttagaagtgttccacgtataaactacttaagattataatttttcaaaagagaatttaggggaatatatgaagcccaggataaaaccttaaaaagctaaaattatattcaatcccttattatgtgatagtgtttgaagcttccagttgtctctagtgtacagttattatagaaatgaagagatatccatcactttcagttactccagcctagtgctcataagctagctctgcaaatgacttcagtttttgtttcctggtaggaaaaaacgaggtaacaatagcaactatcttgtggtggtgtcgttaggatgaaccgtgcacactacctctgtgcacagtacctgtcacaagtcccctcttgcgaatatgagctgtcagtggggctttcctgaggtggcaagggctgagcatgccatccttgatgtgcatgttgtatggatttatatcgctttccttttggaaatgatatttgaaattcatctacacacagaaagtggagggaggtcaataatatgccaaatgtctgaagcctagggatgatttcacgaactgtggcaggctgtgtggccaccaggcatcctctctgtggaagtggtcgcagccacctctcccccaccctcacatgttggggataggcttctgtttcccttttacgatttggaattggtgatagggaatttccaaagcacaaagagaaaaggatcaagaaattattgagactactcaaatcgtcattcattccctcattctgaattattgcaagataataacaatgtggccatcttaactctcttcctagcatatctatacttgatgtgaggattggaaaaacttttcttaaataacatgacagttatcacttattccagatccagacaccatggaggctctgttgcattttgtttctgacctgacgctctttgttggattttgctggcatctagaggcctcctcactgacctcttactaggtgccattgccatttgtttgtcaaggaccaaggtgctcctttccctcctccattcctccatcatctgttagtttatagtctgtatgctcttaaattctttttttttttggttactgtctacctatcttcccactcatcccctgctctggttttgctactttttatgatgtagtttgacacctggagtaagttttgttctattccagaatgatggactgtaagtgtaaattgatacttcctttgttaagaacaatttgccagtatatattaacatttcaaatgtagcaatctgatacagtttggatctgtgtctccacccaaatctcatgtctaattgtaatccttaatgttggaggtggggccaggtgggagaggattggatcatgggggcggtttctcttgaataaggtttcagaccatcctcttggtgctgttctcgtgatagtgagtgagttctcatgagacctggttgtttaaaagtgtgtagcacctccctgctctctcccttgctgctcccactgtgtgagccacctcactccccttttgccttccaccatgattggaagcttcctgaggcctcctcagaagcagaagctgccatgcttcctgtacggcctgcagaactgtgagccaattacacctgttttctttataaattatgcagtcttaggtatttctttatagcagtgtgacaatggacatatacaaccctttgacagaaatttcacttgtaaagattgatgctacagagattttcatgtgaagatatatgcgtaaggatgcttactatagtgctgtatgaagaacggaagactggaaacaacctaaatgtacatcaataagtgactggttaaatacgttactccacctacaaataatgcaatgttgtgtggccataaaaaaaaagaataaagtagatatttagttgcagatatagaatgagctctacaatatattaagaggctgaacaacgtgctgtttacagaaaatatgctctagttgtatataaaggaaaaaggatttaaattcacatttaaacttggtaacacattgaaaaattgcagaaaggtaaataaaaaaatccaaagctaggccaggcagagtggcttatgcctgtaatcccagcactttgggaggccaaggcgggcagttcacaaggtcaggagatagagaccattctggccaacacagtgaaaccccatctctactaaaaatacaaaaaattagccaggtgtggtggcacatgcctgtagtcccagctactcgggaggctgaggcaggagaatctcttgaaaccgggaggcagtgcttgcagggagccgagattgcgcccactgcactacagcctggactacagagcgagactcagtctcaaaaaaaaaaaaaaaaaaaaaaaattcaaagcttataccatgggaatgttttccctttttaattttttaaaaagtgtctttgacgttttggttattctgcattttattcaaagttacatattgctatttggattttattcatttcctaatgaaagaaaacagaagcactcctgctcctggcctttctactaggcccttgtaatagttatctttaccctttcctgtagtagaagtgggatactagtgttttcctcctggtcatgtttcatttcatactgtgatatgttcaagtacctcgcaaagggaataagcccatagtaggcattcagtcagcgtctacgacatttgttacaagaggcctgggcacagtggctcattcctgattttcagcactttggcaggagaatcacttgaggccagtagctggagaccagcctgggaagtatagtgataccccatctctcaaaatattaaaaaaataaataaattaggccgggcacggtggctcacgcctgtaatcccatcactttgagaggccgaggcaggctgatcacttgaggttgggagtttgagaccagcctgaccaacatggagaaaccccatctctcctaaagatacaaaattagcaaggcatggtggcgcatgcctgtaatcccagctactcgggaggctgaggcaggagaatcgcttcaacccgggaggtggagattgcggtgagctgagattgcgcgatgcactccagcctgggcaacgagagcaagattccgtcttaaaaaaaaaaaaaaaaaaaaaaaatcagccaggcatagtggtatgtgcctgtagtcctagctactagggaggcatgggtgggctgaggcaggagaattgcttgagcctgggagttagaggctacagtgagctatgattaggctgagccacagatcgagaccttgtttcttaaaaaaaaaaaaaggggggggggcggggtgaagaaataccaaactgaaaatttctgaaacaaatgtgtaattactactacgctaaacttttttcacacctttgtttgtgagtcagtttccctttaacctttgactcgtaacataaagaaggttaaggccagagtccatcaatggttaaaagattgtgagtgagatgtagaaaaacagtactgatgaattctgaaaggggaaacctcatttccattgcctggttcttgtgcattgcagtattaccacaatatggcattctatacagcagataaatgtaattatttatatgtgtatattggtttacacactggtgttcactggctgcttaaacttacaaataaccaaagatggcagtaatgttttaaagtgtaaagctgtgcttctttgtttataaaatatgatgctgaacatattctttattttctgatactgtcattgcctttttactgtgtatttgctcttcttgagatgaaaataagtatgtaccaaaaaataaatatagctttttaagatgaaaaagctcaagtttcttatggaatatttttatatcattattaaaacagccaaacagactttatagtcccactgtaagttatatgtagttgttgattgttctaggtttaaacttggcaccttttctatgtgctcccttattaaattaatacttatgttcaaacataagctgaggcagaacacgtttccttttcaatagttctcactaaattttgttttgattttatttccaactgtacttaatagctgaaagcttcttgtggttaggaatagtatttgagattttggtggcatctaattattttgaacttttaaagccttaaagagtgaaatataaggccacaatacatttttctgatagctttcatagtctgttagtctgtgttgcttattttagggggacgatgtctaaattgaaatgtttatccactatagttgtaatgatctttttcagcctctttagaaagcagttcattgagcgaagaagagaaaataaaaagaaacataaaagggtaatatgcataggacttttgagcctgttactatttcctagctgaagtttactttaaaaaaaaaaaagtaggcattgggcagacactgtgtgcacgtgtgttggaggaggaggcggggcctgctcatttgtttgcccattgtgaggctgtcctgcacctttgtgcttttttgtaacagggtgaaggcccctgaatagaggccttgtgccctgcttgatttgaaatccatgctgtttatggaaaggaacctgcagggcacccagcgggaagtctgtgtgacaagtggaaatctagaatctggaagaaacgtggtgtttgagggggaaggtggtggggagagtggtcataatctttcagcctttgcttttgtgccccacaagcttaattgtcaccctctgctggcaaccagattgcagagccactctgtaagtgtccttggattgcctgtgcttactctcaccttattgttatcaaataaaaacctagacaaatagcattgaattctcttagaaaaatatgatatgaactgggtacattactagtagaggttaaatatctgaggctttttttgtttgttttttgtttgtttgtttttttggtggagatgtatttaaagggaagaagggctacatgtgaaaagctggaattattggcacgctcctgtatttcagagcgtgttgaaaagcaggtcgcaccaacactaggctggttaaatccagtttgtacagcttgtgtacttggtggtaccagctattgctccaaagtttcctggcttaagaagccatgtaattttaagtgtgcaagaaaggggtgggacagcagaagctttttataggatttcaagtaataaacattaatttttaaagcaatattccagggacttaacagaagtagaacttgtatatgatgtttctttaataccaacacatatttgaactgacaagggaagggagataattttattttaaagcaatattttccattctttttttctcttcaattagaaactggttcttcaactttcagtgccaattgagacatgctataataagtatttaacaattctgtcctgctgtttgacttcagggggaaacgatggtagaatgtttagtagctgagcatacacaggtagctagagatctggtatacagtaaatgtggtgtggtgtggtatttgggttatatatgctaattatttcagcacaatgctgaaaccatgcagaatacctcttggaagagtgtttgacaagatgccagaaaggccgtgttaattataagtttattgtgcctattcaggttttttgggtgtgttttgttccccactgttgttttattctttatgatggttctctgaaaactatgccccatgaacatatggagttctatatatgcgtgtttattggttttatagaaacctcaggatcctatgagcttaataacgatttacgctgttatgtgggtaattgagaggacctgttaagatatagttgatagtaaggttttcgttagttatttcaactttttgaggtaatattaaaggcagtttgaccaaaatcggaattcaacaatccagggagcttttggtttgctctgggttcactctgggtttaaagacagtttggtttggctacagctgacctccctccctgtttttatgaactagtcttcttcctgcaaaactcaaatacagtacttggtatggtctcataataaatttagttgttaattatatatatatatatatatatatatatatatatatatatatatatatatagtttatatttctgctgttattcactgctttttaaaatttttgcttctgataatgtattaaattatagccataacatatttatatgcctgctaaaatgtaacagttgttggttgtgataagcttttgttttgttttgttctgttttgtttgacacagggtctcgctctgtcacccaggctggagtgcagcggtgcagtcaaagttcactgcagcctccacctccaggctcaagctatcctcccacctcagcctcccaagtagctgcaccaccacactcggctaattttttattatttttgtagagatggagtctccctacattgcccaggctggtcttgaactcctgggctcaagcgatctgcctgccttgatctcccgaagtgctgggattacaggcatgagccactgtgcccagccaagcttttgtttaattttagttactgaagaagcttataactcattgagatatttatgaagtgctttgtgtttgtgtttttttttaggacatgtctcaggaaggctatggaactagatctcaacctcctctggcccccggaaaacctaaccatgaagacttgaacttaatacagcaagaaagaccatcaagtttaccagtaagacattattgtgctgatttggaaatgtaatgagttaaagacttttagaaagagctgttgtttttgtttgttctactttatattatgacatgattgagaagtttctagacttcaggtttattttgtggtcaatttttcaaggtttaccttttaggagctctgtagtcctggataagtctatttcatgtgtatatatctctgttgcagagtgtagacatcagttggaaggttttatgcggctggtcgattttgtgtgcaggtggttattgctgttgtacagttgagctttctttaggctgttgctttttggcagcgatacagaacagaggtgtccttagaggagtcaaaacttaaaagaaatttgcactttgcaaaggatacaaatgatgagataaaatacctgatagtaatttgaatttcttctaggactttctatttatgtaatgagaaatcacccaaaagaaggtagtttgaaatttgaggccagacgcggtggctcacgcctgtaatcccagctctttgggaggccaaggtgggcggatcacttgaggtcgggagttcaagaccagcctgaccaacatggagaaaccctatctctactaaaaatacaaaattagccaggtgtggtggtgcctgcctgtaatcccagctactcggaatgctgaggcaggagaatcgcttgaacccaggaggcagaggttgtggtgagccgagatcacgccattgcacttcagcctgggcaacaagagcgaaacttcatctcaaaaaaaaaaaaaaaaaaattgacaaagctgtttatttccaccaataaatagtatatggtgattggggtttctatttataagagtagtggctattatatggggtatcatgttgatgctcataaatagttcatatctacttaatttgccttcttttatagagaacctaatttaaaggaagtcttctttattaactaaaagaataaatctgcaggaggctgaggcaggagaatcacttgaacccaggaggcggaggttgcagtgagccgagattgcaccactgcactccagtctgggaaacagagcgagactccatctcaaaaaaaaaaaaaaaaaaaagaataaatctataccaataaatatttttacatttatttgaagaattgttgtcattgcctagtttctatggagaaggtttgttttaagatgggaattcagtatagccatgattttaattggaatttcaactatgtttgcattaacttagatttattacttctaaacatttgagaacagacatttgtagtgaatgttaaacatgacatttgacatgcgtaccataccatatacattttaatgtatatgcagatttagagaaggtaagtgatgaccacaggatgtctactgtctttgaatctgatggatatatttttgaaactctaatttttataccttttacttttatgtgagagagggtgaaatcttattgtggtgtttttccccccccctttagtagtgttaatgtatttgttgtctaggtatttggttttgaaggagggaaataggtaatggattttgtgttgtatgctgctaaactttctgtagcagatagttcgcagcttggtaagcatgtagtgtgtacgtgtgtgagagagagagaaggagagagacagaggcatgcatgctgtcgataaatactacatttgccaagtatttggaaattagcttttgtggttctatgaaatttaaatagatgcatgggaagcaggtaaacagtgaattccacttttttcagcagttttttagtggttttggagaggttcgaccttgtagatttgtcattggctgatgattttgtactgtgacacaggttggtaaatttgtcataaatggatgcagattttctgcatagctataaaaatagtttgtggtaaactgctttcttcatatctactcagaaacttcagcatcactcactagtgcgtgccttttgccatggatctgtgttggattggatggttgacattcagctaactctacagtgttattagggatggcatgaagtattgtagtttcagataactgactgaagagtttggtctgggataggagcttttaagttgattgctggaagagtggatgaaggcatttaggagatgaacgaatatagtcatcaactgtttaaatgttttctgaattgttctatttctgtcttgttatgtatgtataacagctatcttccttaacctttatcttgcctacttcccaaaagtatttaaagttgtccataatgtaagttttttttttaatgaaataccccaattggtattttctttccgtttttgtaactcacagataaataagatgctggttgactcaatagtacttcaaacacatttcaataatctttagagagcagagtttccaggttttatgttaagtatgtagaagattcagttactgaataaaggacaaactgtaagataacctgctacacctaaaacccccaatctgttaggatgaaatttggctgtagttaaatgaaatttattgcaccacttttttttttttccacgagggctttgcatgtgtaaaaactttctgtatggggcttacaaatattttaatttatgtggatacttataataagttgcacacagctaaggtcattgtggtttcagggaatgatttgttgatactctgttacggctctaatagtctgtattttacaatgttacttttattagatactgtagtcctctaacttggctgggttgattctggagagcccatgaagctgtatttgttatcacatctgaatttgctgttggatcctttgtagatttactgttgtgctatggttttccttttcaggtgtcagggatataaattttgtcttttcacctacagtcaatccatgatatttgaaacctgtagttttgtaatttggaattaagtatattgtgttatctgtaccatttatgaaatgcaacatagtgattctaatgtgtaattattctgttcattttatgtaatgacgatgacaagaatgcctctcaagtagtaatttcttagtctttttgcttacagataggtttgtaatgtttctgcatgtgatattttctacctgtatcctaagtagatttttctttagcatgtttgttacaatgtaacaactttgcattataagaaatcaaggcatttccaatatctttatgctacatctatactttgatccctcagcaagttgtcctcactgttgtgtgaacctgtttttctatatttgcatgccattaaattcttgatgaccttcagtaggcaatgcagttatgttttccagctaacttagatagaccttcacatcatctgcagaaggcaaatgattgataaattaataacttgttctctcgttatcttggagccatgaccagtcatatttactttttgcttagtggactcagacctaagcactgaacaaatcctccttaatatcgtccacttatttctatacctcttagtcgtacagcatttccctgtttagttgtattagtttatacatccttggtattactgttattgataaatcttaacattgaagagctctctttcttagactattatcacttaaaatttgagcacatttagctttcacgacctctaatattggtatgaaataaacctagcatttaagctaaagacacagtggaatgtctaaaagatgctgtcagttacttattttcttgtttcataaacattggatatccctcaatttatattccaagatagccctcaaatatgatttaatacactttttgttgagtgttctgttaaattttcacctcttgtggcatttattatttatccttttattatagttatcctgaacattgtcttcgctcccctatttcactagaagcttttcatggtatttattatgtcctattcagtaaatattttcctcaaaaatttctataaaaattattttaaaataaattatttcctcattttcagaattttcttttaattgctaagggatctgttaggtggcattgaatggctctcggggcacctgtgctctctgtgctggtgctgctgagtgattaaatgggtggatgtctgcatcgccaggtgggtgttattcttaaaatgattctattttaccaagtgacatttggatttactttggtaaccatagctttaggaaaagaagtggacactttggataattaagctaaaaataccctaaaagcattctgttcttagtaatacatcttttttacttataaaaaattaattgacagaaatggtaatcataagttcagtaattatattacagatgggtagttaataaaatattcgtaaacatgtataaagggaagtaaacatgaaaaaggaaaaagttttattttcttataaaacactatataagcactttcttatagtgcttttccctccagggatctgaagagttgttaatattcctcagtttaaaaataactaatttgttttattcttcagagaggcatgctgctagctttgtatttcagataggaggttcattattctgtttacctaagatatagaatacaatcagtttggaatacaatcagtttggcagtcatactctaagagcgtttgaaaatggactgctttgttaggactttgtgaaatatttctataaatattggctgttctagaaggctcatcaggtcattaaaaacctctttgtgaccctttcttccttaaataggaaatatctaaagaggttggcatgaaaacggtttgatctttctgagttaactaaaaatccctgaatgtgttgaatagtgcttatggcacttttgttgagtttgcaattagacggaaatattgggctttagataaaacatatgttttttggctctttgtgaaaggaaggaggtagtaaatgctggtcgttctttgaaatagagggtgttaaacaggatattggaagcctgaaagagaatggttggaaaacttttattaccaagaatattcttggggcttggctattagccgcagagcatgcagcgttctgcctttaattcaagaagaatactctgtttgtgttggtttttgtttcttaatctttaatgacacttacgttggttagtggcaaaaggtcatgtgttttggaagcatgtttgaatattgctgacattcatatggatgttctaagcatgtagatttgataatactgtgaatgattggaaactaccgggaaaagctttttaactgggttcagctttttgctagttctcagtccaacccagctagaaatgtaaattgctaagaccatctgaacctgtgagctggcaggttttggcaaaagttaaaatctaccaggtaagaattaggtgtatggctattgaatgaagtattttgaaacctttttatttgaggttgatttaaatggttgtcattaaaaggttaagagtggagctgtcttccgttgattgatccttctcaaatccttatgaacattaaaaaaattataagttaatgaaggaaaacccatatctgtcatcaggcttatctcagtgttcaggcatggatgatgcctgtgtgttgctgaagacttaagctgtttattatcagtattctcaaaatgttattaggctatgttgagttttagagtttcagagaaaatactttataaaatggaagcctcctgtgccagggaggaagaggaggttctctgaaggatggtgccctgtcccccagaacagctacaggcataccttatcatctgcatcgtttcaaaaccaaaggtacagatgcattttgatgtcttggggaagttttaaagggaacatgcaatacttcagcttcttaggattcatcaagttcttgaacataattttcatcactggtctgttctatctggagatatcagttatttttggattaagattaagagcatttcaggaccttgctggaaaacctgaatttagaaaatatgatagtgactctgacagatgtttattttccaaaatggattatttctttaggatgtgatatcctgtgattttattccctaggatattttcatgatattgatagtcattttgaaaatagaggataatgcttgaacttgaacaaggtaggaagcaggaaggtatgtctgtctccttctttcaaaacaatcttccatttaaatatttgttctgtaaatgaaaattcaataaaaccttaacagtttggaattcttccaggaaaaaacaggctaaatataatggaaagtctgaataaattaatattgagaaagaactatagtttgcttttaaataattcagatgtttgtgtgcaaagtgtttctaagttgacatactcagttcccgttaaaataaaattctgaattcgtcatagctgagatatttgcttagtggtaatgttttaattttaagaatttgtttaattttttaaaatacatttcaactaagcatgcccctgaaaactttttcatatagtattctgaagatttccatttaaaatatgggggaaatgaatttcaacccattttataggagtgtcaattagttcctaaaaaattaatgaaggagtatgaaggagtactataaaaaaatagacactagacaaaattggagattaagagaggctgaagcataactgatttgcaggatattggttttgataatagaaggataaggatgatctatagttgataaatgaggctcattaagtaagagatgataaatgcagatattcctggctaatagaaaagtcagcatacaaattttgccataacaagtgagggatgggcaggctttgaccagcttgcagctcttccagtgacctctgtgaggccacggagctcttctgtggtctggatgcctgggccacagaggcagcgtggaccccatgggcctcaggccagcagaagggggagccagagtgggtctcagggagtctagagccacctagagcagagcttacaaggagctccacaatggtgcagaggccagggcaggactgcagctcctgcaagtgtaactttttattttttatgctaaaaagaaaaaaaaaaaaacacatgactctaatgttctgaggtccctcttctcaccctagcctgcacttctggttttggcatggcagtgcctgccatgttgggctagatgccaccatcttcacccacccatcctcctcctcctattgcttctcctgggcattgggatctgctgcctccagctcctgcaggcaatggccagtgtgaggcgttgaatgcattctactttatattatccaagttaggtgggaaatagcttttaatttacagattttcacttcgcaggtaactctgaaggcacacatctgttttatataacaagggatatataaccagcaggagctcatagtagcatttgtagactggttatttgcttttatgtttctttgggactggaagtaacaatttttaatgttaactgtcagtttaggagaggaaataaatacatgtagagaaggttctacctgagccaaaatttcccattcttccctcacaatgtaggattttagaggtgtctctcttgttttctcatctttttcttttgccttctctaaattgttgtaaaataactgaatggtcttgttttcctttgtttgggtcaagaaattttagcggaaaattgttactgtgtgaaagaagattattgactcaacaagccttcaattttccgtgaataacactcccaccccctagcttcaggaacatgccgtgcgtgcattctattttaaaatatagactgtaatttaaaacaggcattttgatgccccactgaactttgtttaagcctggaataaaagaggagaaaaaagctgtaagccacaaaaaagtgactaagctttctcaactacttttcttcataatgcattctttaaaaaaaaaaaaaaagcatgttggtacgattgtctctttccacaggaccgaaattgtacccaattttagatcatggtgtgcacatctttctacttggttcgtgattgagataccatttacatttttcagtgcacaggtttgtatttgttgctgtctgtatgcatgcatctgtgcatatggtacgtgttcattgcatgtgagaatattctaaaattacgtatatcatttttagcactcacttactaatagctaattttttagagctcttgatttaacctgattattagactgaaatgaaataaatatttaactacaattttatttaccatcgggtcattgtaaaaattgtgatttgaaagtagtttatattacttgccttttttcctcctcacaaaaatgaaaataaacagcttataatgacttgtatggaagaaacaattgctttactgtttttataaaataatatgttttggctgggagacctattctaatcgccacactgaatgccaacagggcagactctcagctaaggttctggccttgagcaatacacgtcatttctcagagcttctgtttctttgaaaaatgagtaagttagatttaggaaactctagcaccttctagctccaaaattttacattaaaagccatctttgttagtgtatgagaaaaagcactgataaaaacgggccctttgcatttgggaaaaagtcagtggagtgagtaaagtgcgggtacattgaaatcttcagaaacggctcctgtgtgctgcttggtggcctctcttccattctccgatgccatttgcttttgtagcagggacacttgaacttattgagggatttggggttgccttactgagtatataatcttactatgcaggccattggagagccgcagaccttcctgtggtctccctcttcttgttcatcctagagattccagaggtcctccttcctctcctgtatgatcagtttgggagccgtgatgtcgttgcatatagggaagtctagggaaaaggaaaaaacttcatgggaaagggaagggggaggcagaacaaccaaccagccaaccaaataaatgaaaaagctgcaggacgccgaaatctttgtaatgcaaaggctaatgccaaccggatggttttctgaaccaagttgatcatgtggcagttgcttttcatttcttggtgggggaaggaaggccctaagggcatgtatctgaggcctcccttcacctccaaacctcaggtttacatttgttatactaaaaagtcattcataaacacactatgctttttaaaccgagattgacatgaatggaagtagtagcaacccagagacatgaaaaaccactgttcgtctttaatgaaacccaagctgttttcctggagaatgcctcctgcatcccctgcaagctttttcttcttcttcttctttttcttttcctttttttttttttttgagacggagtctcgctgtgtcgcccaggctggagtgtagtggctcgatctcggctcactgcaacctctgcctcccaggttcctgccattctcctgcctcagcctcccgagtagctgggactacaggcacttgccaccaagtcgggctaatttttttgtatatttttttttttttttagtagagacggggtttcaccatgttagccaggatggtcttgatctcctgaccttgtgatccgcccgcctctgccacccaaagtactgggatgaccggtgtgagcccccgcatccggctttttttttttttttttttttttttttttttttttgtgagtgtttagagctcactggttttgatctgggtagagtggtgtgttacagttctcatttttacttgttttctcactgctctttctgtcagagcacaaaatggtatgcactgaggcagtggcagaagccatgtccgctcctcaggcagatgtcctctctaaagcaggccacagtgagcctggggaccaccgagtgtgctgcggcctcctggcacctgtgcctgcagattctttcctgtttttagaatttcctgacttgcgtaggtagggatctccctgagtctttcttttccccatgggcatgggtggttgagctgtgcagtgagtcagtccacacctggggaaaatgtgtagttggtcttttggaattatgctgtacccggaaaaagtttggctttagaatggtaatatgacacttcattcattggacactatttttgaaagtctggttgtatataaatgaaaatagtgtctgggcatggtggcccagcactttggaaagccatgagtgggcagatttcttgagcctaggagcttgagaccggcctggccaacatggtgaaaccccatcttcactaaaaatacaaaaattacctgggtgtggtagggcatgcctgtggtctgaactactttgtgaggccgatgtgggaggatggcttgagcctgagagatggaggctgcagtgagcagtgatcacgtcactgtactccagcctgggcaacagagcaagaccctgtctcaacaacgacaaaggtgaaaatattagttaatggacactagaa

SEQ ID NO: 144 - DNA, 1056 bp, Homo sapiens
atgggcttgggcaaggacatgggcgcccagtacgccgctgccagcccggcctgggcggccgcgcaacaaaggagtcacccggcgatgagccccggcacccccggaccgaccatgggcagatcccagggcagcccaatggatccaatggtgatgaagagacctcagttgtatggcatgggcagtaaccctcattctcagcctcagcagagcagtccgtacccaggaggttcctatggccctccaggcccacagcggtatccaattggcatccagggtcggactcccggggccatggccggaatgcagtaccctcagcagcagatgccacctcagtatggacagcaaggtgtgagtggttactgccagcagggccaacagccatattacagccagcagccgcagcccccgcacctcccaccccaggcgcagtatctgccgtcccagtcccagcagaggtaccagccgcagcaggacatgtctcaggaaggctatggaactagatctcaacctcctctggcccccggaaaacctaaccatgaagacttgaacttaatacagcaagaaagaccatcaagtttaccagtaagacattattgtgctgatttggaaatgtaatgagttaaagacttttagaaagagctgttgtttttgtttgttctactttatattatgacatgattgagaagtttctagacttcaggtttattttgtggtcaatttttcaaggtttaccttttaggagctctgtagtcctggataagtctatttcatgtgtatatatctctgttgcagagtgtagacatcagttggaaggttttatgcggctggtcgattttgtgtgcaggtggttattgctgttgtacagttgagctttctttaggctgttgctttttggcagcgatacagaacagaggtgtccttagaggagtcaaaacttaaaagaaatttgcactttgcaaaggatacaaatgatgagataaaatacctgatagtaatttgaatttcttctaggactttctatttatgtaatgagaaatcacccaaaagaaggtagtt

SEQ ID NO: 145 - protein, 202 aa, Homo sapiens
MGLGKDMGAQYAADAWAAAQQRSHPAMSPGTPGPTMGRSQGSPMDPMVMKRPQLYGMGSNPHSQPQQSSPYPGGSYGPPGPQRYPIGIQGRTPGAMAGMQYPQQQMPPQYGQQGVSGYCQQGQQPYYSQQPQPPHLPPQAQYLPSQSQQRYQPQQDMSQEGYGTRSQPPLAPGKPNHEDLNLIQQERPSSLPVRHYCADLEM

SEQ ID NO: 146 - DNA, 39700 bp, Mus musculus
ttaggaggcgtggccttgttggaataggtgtgtcactgtgtgcacaggcttaagaccctcatcctatctgtctggaatcgagtcttcagatgacgatgtagaactttcagctttatgtgcaccatgcctgtctacatgttgccatgctcccaccttgatgataatggacctctgaacctgtaagccagtcccaaatatatgttgccctttataagactcgccttggtcatggtatctgtttacaacaataaaaccctaactaatcaatcttgtctatcaaaaaaccttaagttatacagaggtaggaaaacatgtaataaactttttgtacttatagccaacaattatttctgacccatcttttaccacccatcccaactcttccactgcattattgaagtagatacaagtatgtcactaggtatgcttcaggatccaaatgggatattctgttttccaacttcatgctgggtgttcactacaatgtgagtgtatataaacttagtttattatatggatttctacatttagagggccacatatatagtaggtatttaataaaatacaagtcacagagctgaggacacagcttagtgggcagctcttccctagagtggttagggtcctaggttcaaactccaataccaatactgcaaaaacaggaaaatcaaacaaaatgaaaacatcccagaataaactttttctatgcatttaacattcaagatacgcatggtatatacccatcttgttgatattgagaaacaagcacaatataagttttctcaccaacatttaggaaatattttctgtttatctcatacagtatgaaatgcatgaaaatgggtctgaccttgggattatattcagcatttcttgcacgaagtgcaatggtctttaggtcaagtttacagccaagattcacggtagatacaatatttctgcaagaaatttgaaaacatgattactgaaaatacataacttttaaacaacgaaggcaatgtctttaggtaaaatttacaaccaagattttctatgaatataatatttctgcaagaaatttgaaaagaaaatatgattaagattaattgataattcattgttttttcaccaagctttaatttaaaaaaacataataaaactctgctgactttagtccaaaaagtgctccataccagatattctcacttatactcaaaatgtcctatgaggtgttaactactcctcccatattcagacaaagcggctgagcctcgagggaatgtactagctttggcttgggatgcacatgataactagccagcttagccaaaccagcacatttcatgctagtgacaaatcccatcttaaaaaccagggtgtgaagccgggcagtggtggcgcacgcctttaatcccgaggcagagacaggcaaatttctgagttcgaggccagcctggtctacagagtgagttccaggctagccagagctatacctgactcaaaaaacaaaaacaaacaaaagaaaaaaattaaaaaataaaaaccagggtgggtagtgtcctgagaaagaacacttcagactctctactgacacacagagggtgcatgtacacacacacaaacatcaccattttccacccaggtctaaaggactgtttcatgacactatatcccgctcttcaagttgtctatgaaatactttgttttccatcttgagaccaggtttctctatgtagccctggccatactggaacttgctctgtagaccaggttgtcctggaacacacagaggtctgcctgcccctgcttcttcagtgctgggattaaaggcatgtgcttccaccacctggcctagaacttttaataaaaactgaaacatagcaaactcaactttttctgtagttttctaggtctttcaaagtagacagacctgaaatgaacaatgccatcaaatgcaattaatagaccatcaactgttacacaagaactccagacaaccagctctagttcattgttgctccctgctctctttttactctctacaaagaatacttttgaaatcttgtgactcaaagtcttgctgaacagcaaggcaacacggtgggaggcttaggcaggagtattctcaagaattcaaagcagctagcttatattccatagacagcaccaccctagccagctttatcacgtgagacagtctcaaaaaaacccccaaaaatttaatttaaaaattaaattttactggactagttttctctagtacataatcagaaagtgaggtagatcaaatgttttcaattttccaatatctatttccccccaacctaagaaatactaagaaaaattcttgttttacttaaaaatgggtttgactcagcatgcccatacgtgaagtgaattttcaggtacactttggtgcgcctgtcacaaatttagccatgcaaatgataaatgtgttattttagaaagttaaatattgggaagggggtaacatttggaatgtagataataaaataataaatttaaaaaaaagttaaatatttacctgaattctttataaggctgctgaactgacacctaataaggaatgtttttagataatggaaacagtaatgtggttgattgcatgctctgtggatatggaaaaaagtgtatgtcctaagctgactctcacaaatgattttaatcagaagtatgagcctgaatgcctgtggacgtcaaacaggcataaagaaatagtttacaacagtacaaacaaaaggagtgcttatagggcttatctctttaaactcaaaagtcaccttaaaattgtgtacagccaaggtagaatcaggttatgccacttagcttaaaaatgaggtggcatggcttacaaatgacgatatatatgcagaaagctaagtgtaaataggaaacaacgctgaaagtaggaaggtggagttactaaacacaaaacccaaatagtgttgtctgcaaagaactctttaatcagcctttaagctttcttaaagtaaagctagattcttgttactaaatggtatctggaaagtttgggctgtttgaggaagaaaaaagcctgaatctcccaccttttttacatgtgggaaatactttacttaggcagaaaaattcatcaagataagaactgctatccctactctgagagtgacatagatctccaaagatataaatacagccctcacagccaaaactgaagaaaatcctggacccctaagacctgtgctgatacagtcaaagctgtgatccaactggccagtgactcagccaattagctacaaggaaatgtccacagtatcactgaagctcagtttgcatttctgtggcccgaatacacaaacacaagcaactccatttctaagggaaagtctctgctgagagtactgacccactctgtagcttcaattcctacaagaacagataaagtcacagtataacagaattaccactgggccacttccttaagtaaatccagtgtctggaagcaaacagtacaataacactgagcgcctcctttggtgcagagacaaagggcaggggacagaggacaaggaacacaacagaaaacgcatgaatacatacgcgcatgcactcactgttacacacaggggctggggtggtgtgagaggtactcactgaagctgcggtacaattccagagctctcagaagctggtgtggcaggagtgataggggtcataggagtcattggtgaagggtacaagggggtggtgcctggcaacggtgcagtggtcagagtttgagaatggaagagttgtggggtctggcctgaggcaccctgtgtgggttgctgagatgttgattgctgtactgaggctgctgcagttgctactgcctgctgttgttgctgctgctgttgctgttgctgctgctgtctttgttgctcttccaaaatagagagactgttggtgttctgaataggctgtggagtaagtcctgtgccgtaaggcatcattggactaaagatgggaattccaggagtcatggcgccctgtggaaagcaaagagagcaatgattaagatactgatggtgagtaatttaggtttttccctagtgaaacccaagtaaagtaaaaagactaatgttttctgaatataataggtcattaaatactagggaagaatttgtatcctgagatgcacaactatcttctgtagtactgaccatagaagatgaacacttaggatttgaaaatgttatttatgatatgcaaggaagatgtttagcctctcatgtgtatctagaccataaagaaaaaagcctatgtcccaatttaaagtactgcccagtacccaggcatggtggcacgtctttaatcctagctctggaggcagaggcaagtggatctctgtgagtttgaagctagcctgatttacaacgcaagtttgagggatgttgttacatagagaaaccctgtctcaaccccacccccacccacaaagtactatttaatatatgatgattatccactgactaagcacgtgtcagttttggacgacggatcacatggatgatggatgacagactcatggatgcctctatcatactatttaataaaaagtaatttattctactaaaaacaaaaatcaacaaagtctgtaaaatactgccaactgccttttctataatgcttctatgtcttacatatatttaattataattaaacattttatttataaaaataaagtagaactaattatttatgtggaggcagaagaacactggagatggtaaaatgtatatggaattggtaacaatctaggtctaattctattgcaaacacatacacacatacgtgcacatgtttagcatcaaaaccaatgtttaattttgaaagcagatttggtagtaatcaggataggaaagtgactgcaacaggagcaataaatttatttattggagtaaataagataaatgctctacagctcatagagagtcttctaattaattaggttccaactaaacttcccaaacaaaagaacatcacagctatctaactcagaaatcttcacaaagtaaaacaagcttaaaaacctaaaaatccacgttcactactgcatggtaaatgtcactgtcttttgctttctcttaaagggaatatgagccctctctgcccctccctcttgctctattacctgtggggaggccaagccctgagcataaggtggaaggctgttgttctggtccatgattctccctttcttcagtactcagatcttccctagagcatcctctgaatatctccttagaaacgtcttcaatgttctgggttatcttcacacaccatgaaatagtgatgctgcttggaaaaatatgttttaagtttaatagatggacataggtttcatgttcacacaaaataaacacagaactattttggagtgtgtgtgtaaatacatacacacacacaaacatatgaatatatgtatcttttactctcaaagcctagtccatgtttcctgtgactcatgtaaaatcaccaacaaagacaaaacctttgttgctgtgtgcttaaatattctaatagtactgaaaattaaggtgtcaagaccagtaataaaaactattggagaaagggctggcaagaaacggtgcatcaggcaaaggcgtttgctgctaatcctaatattgtgcatttatccaaatggtgaaaggagagaacaaactctcacagccaattcttcacataaatgtaattcattttatatgtgtattttgtctacatatatgcctgtacatcactttcatgccttggtgccttccgaggccagaagagaaggtcagatgccctggaattgagctaccatggggtcatatgtatccttaaaataaacatgggtctttggatatacaacttgtaactttgaaacctgtgtgttctttgtgaatttagacaataaatatttagattaagataaaattgtagccaggcagtggtggcctttaatctcagcacttgggaggcagagtcaggcggatttctgagttcaaggccagcctgatctacagagtgagttccaggaaggccagggctacacagagacaccctgtctcaaaaaaacaaaacaaacaaacaaacaaacaaaaatcaaatttagggtgtgagagatggctccaacctggttctctagaagagttggcagtgctcgtaacctctgagccatctctcacagcatcaggggccagccctttgtacaacctccaccctcacttcccaccccccaccccccagcaaaggacttgaggttgggggaaagaattcctaaacaaactatactgttagaagagaacacttatcggcatgatttgcacagtctattaggtcacttcttgattttaaatatgctgctcagttttataccattcacaatacctcaagcataaagcgccatacatattgaactggacacaatatgctttaggtagttgtttgtgtttcaattaaaggcagactaaacaaaagatgaaacattatctcatcagagcatattaatgaaaactatgcctagaactgggtttctttaatcatcatctctttcgaggtcatggacatgaaatatgaataaagactaagagactatgaaatgtgttgtttttcctttgtaatggtagtagtgatagaacccagatcctcctaaatggtaggcaaaggcccaccctcaattttttaaagatgcttaaaaaaaaaaaaaaaaaaaaaaaactgcaggcatttactaagcaaggcaaaatgttgaaaagctgaaacctaggacaggacttggcatttgtgctcatgaatggatgctatggaagagagaatacaaactaaagtcaaggggctagagagctgttctgcgattaagagcactgttgctcttcagagggactgggtttgattatcttagcacccacatggctactcacaactagctgtaaatccagtcctggggagtccaatgctctcttttgtcttccatgggcccggacaagcatgtggtgcacatatagacagataagcaaaacattcacatatgtaaatcttttaaaaagttaagaaagacataactaaagtcaagtaccttctgagaggccggaactcgcacaaagcaggggcaatgtaacacaggtctagcaaaaggagcaaaaggaacaaaacaacacaaatcagcactctaggtgcagcacaaatcacagaagggaaagggggggacaaagccttggaagagcatgcagtgtgtgacaggctcagtatgtaaagtcactacaaaagatgacaaagcagctgtaggtggggttgcataattcagaatgtaagatgtcattacacaggcaatggaaacagttaaggattttaaggtgcagtttgagtatctcctgtgtcaaagagcagataaatctgagaaaattgaagactgaaaattcaatttcaatcactgctttggttgaggaaaaaaaaaaaagttggatttcatgtccaaagtataaccagttatttatccagatctctttctgcaaacgaagtttactgaacgcttgattatatagactggggaatttgttgtacgcttcgcagaagtcatttcacacctgcagacgatataaaccaccttttctcgtctgcaatcttaaaatcgcaataatcgctgcacaaacttatttttaggctgttttctgggttttcatcttttggaaactgagccatcaaactgagtatttgggaaaccgattccgcacagtcttcaagcgtctgcctaaccggtccggcatctttttccagagaagcctacccggagttttggaaaaccaccttaacttgaggctaaagaccgacagtgtgtaaataaagcagcatgcgtttttatgttaatctcgattagcttgactctcaggcttctggcgagatgctgagtctcgagaaccgcttcctaacagaattattcttactggggacaaaacgggcggctgcaggcctgggtaaaactctcccaccgggggaagcggctgagacgtgcggtgcgcggggctgtccggtgccagcccctcggagacgctcacccttggtactgggtttcaggaccccgccgaggcgatggtccagagactggttactcgcggagccgccgcagcgcgcgcggaggaccgttcccagcccggccgcgcgcccactcgcgtctcctccggcaaactccggggacccgctgcagaagtcgcctttattaaggcctccaagcagagaaaaggatgaaaggaccgttacctgggcactgcggagaaaatgacgcgaccgcagaaacctagccaaaccgccagcagatacccgccaccgctaccggactcgatccaccgaacgcctgacgcacatctgatgccgtcacttccgccagttgcgctcttgactgcagtccgatttgttgtgcttaagctgtgagacactgggaaggaaacgagcgggccgggtaccagcagttccggggcggggcctccgacggccctttctagctgtcaaagagagatctattgagtgtgtagcggaaacagttggggatgtggcaatggcgatcaagcccaagcaagcgttctaccactgaactacatcctcagtcttccatgatttgtttttgtgagaaagagtttctctgtgtagccccgactttcttgggactcactctgtagaactggctggcttcgaactccagagattgcttggcaagcttactggctcctcccctttgagatttgtgaggtggctaaggaaaatgtcaagcaaacgctcctcatcatgttctcagtagatgttaacttacgttcaaggaagaacaacaaaacaagcgactttgtagtcacagattcatttctatttttagctcggtcactaccagctctcttccttgctgccacaagaaaacgtcagctgtttcttaggctgcttcataatgcttgattgattccaacatatcttaatttttttttccttctgaagttcatctaaggcatatacatgtgttgttctgcgtacttcctttcccttgtattttgcattatcaacgaggtaatgagctcctttaggttaaggttagcgctctctctctctctctttctctctgtgtgtgtgtctgtgtgtgtgatggacagtatctgtgtgttatgtgtgtaggtgttgtataggttgtctatttacacagactctaataagtacaatagtactgtgtatctattttcccctaaaggaaacattttctcttgaaagtacaggaaacctcagaagactggggaattgagaaaacttaacaaaggcttgtcaagaggcaatataagggaagcgggttttatgttgtcttactgtttgaggagatacaacccagggggaagcatgccaactggattgcatccacagaccagaaacataaatagataaatgttagttcgcttcttctttatttagtcgggaaatccaggcaatgaggtggcgccgcttatattttagttgggtcttcgctcctcaattaaaccttgaaacacccgcatagacgcatccatgggttttacctacatgatgctaagttctgtgaaattaacaatattaaccatcatattctggctaaagaaatctggtattgcttcctgggtctcgtggctgcgtacaccacacagttgacatgcgtcctgattggccttgaatgcagcatgaactactaacccgtctcaaacgctgtgccacttcgccaatgtgacatccgagttgtcgttgctctgtaattgggttaatttttttggtatggtcagacttttaattttctatccgccatgagtaaatccaaacgttttcttagggttataaaacaggtttctctgttggcaggattggcggatccaggttgtgcgctagccggacgcaggcgtagacctccaagagcaacgacgagtgcaggctagaggagcctaggggggcggggcgagggaggcggaagtggaccggtcccggcggccattttgccgtgagacagcaggagttaggcgcgatgctttccactgctgcttaccgagacgtggaacgagagctgggaatggggcctcacggctccgccggccctgtgcagctgcggttttcgccttatgccttcaacggagggtaaaagcctgggcctgctgccctcacctgggtcgagcctggggtcgcgacgggcgggtgtgggaatggcagggatgtagcctgcagcccagcactcagttgtgcatggacgccctcggtgccgtttgctccagcaaccgggctcccacctcaatcttccgccctatggcctgttgtttggtagggcttgaacacgtttctaaagccaacgggcgaacatgaagttatgatttgtcttggttgttagacgagtagctgtttctgtcgctgggccgcctgatcacttgttgttttaagaggaaactaacatgattaaccagacttaatttcagggatgaaagtgaaggttgttttgttctgctcttgagacgtagcctgctgggcaaggtctactgagctgcatccacagccttaggcagtcggacccttgtgtgtgtttatttttactctcaaattactttagcattttaattatccgctttattcgaagatatttttcctttgtatttaggaccgttgacaatacaggggtattcttcatcaaattagaagttgaaacagctaattatccaaaaaaggggggcggggggggggcttgtttaagaaaagcaaaaccagccaggcggtggtggagcacgcctttactgctagcaaaggcaagtgggtctcttaagttcgtggccagtctggtctacagagcaagttccaggacagcctgggctacacggagaatctttgtctcaagaaagaaaagcaaaaacgttaaatatggctttatgaatgttgagcgttgatcatacagatagtgaaaggttgattttagtcttggttgtaccttttgaagagcaattgtgaatgtactatgtgggctcctttcagttacttatagattggggaagactcaaggtaggtttttttgtttgtttgtttgtttgttttaatttcaagcagttaagtgaataatttcatagttttacttcttgactcttggcatctaaacagcccaggctatagagctggtgtgaattagaaccggatttaaattcatagcgttctcagccgagtccagtttcagtttgcttttccagtatgctgcttaatgctgcacgtgaacactaagtacttactttgtaagatgtgttaatttcaaggtgttccgaatgcagtactcatgagtcactttttttaacctcctttacttcttcttatccatcactttgttcatagttacttacacctatccattaaatcacttttctcttttgtgccttttagcatttattgcaactagccctgcaagcagcctcagattctacaatatataaatttctctttgtagcttccaggtttttgtcacttgaggcctttatataattactaatcttttataattcctaagtctgtttctgtaactatttctcaaaagtccctgaaattccggcctctttgggaaaccgtatctaaccgagttttctgatctctccataacccatgttagtaaacaaaacaagcagggtaattgttcctttcagttactgctgctccttggaagtcttggctcagtttaaaggggtggggatatgttgttttcctcagcagacacatctagggagttgtaaaaccttggttgcatacattggtgtcgtatttgaatttgcccttcttcctcctgtcatcctgcgttccttctgtcacagcactcttactggagcagtattatgtcccatttcacgtagtactattgggagaattgtattaaaacctcactttgcaagtggaacattctcttttttgttctgtgtaactctgctagaattctaaactccagcttggtgcttggggtcttctacagcagcccatcacatgaggagtttgtatgtctctggtaaccttaattaagttgcttgagtggcctgtggtaatattttttcccttctgttgctgttcatggtatttgtaatgccattcttttttgctttggagttttagtgcaaaacttgcttcagtaaaaatagtaggtaatgttttctggatgtttattttctactaggaaataggcacttacatgaattatgtgtttaattctcacactctataacagaacagggactgtagtaccatcaatttgaacatgagaaatttatccaaagtcacacaactaataagtggcatgaataattccagtgcccaggtgcttagtcatcacatagtgccgtcctactgtgtacacatagtgctgtcttactgtattctacaatggttattgttcacttgctagaagaactggaaagtgtcaggtggattttatagttaactaatttaatccttatatacagcacactaatatgagatagtttctaagtaatctcatattttaaagaaattgaagtttttaagaagtactttgcttgagaaagcaacagtagtatctaggttctacttttgtgttttttctctggtgcccttcagtaagttatcagaaattgtacaggaagaaaagaaaagcttgctttttgactatggtatgacaacttttcctgggaaggcacacacacccacacacacatacatacatacccctacacgatttatgaaacatctacgtgacccttgggttactgcaattgctctgcagttggttaaaatttgattggagaacaatggatttttattgggattactatgtcaggagtgtcgggagatacttagagacgcaaggatgacccagaatcaactgtatcataaaaaagtccactccagaacagttgacaacgtataaaagccgtggctctggatttctgtgcactagtaggtagctcacaatttggaaaatctcttcttacagcttggccagtcagtctccacccccaacagttaagacaatgtctcactatgtaaccttagctgacctagaactcacaaagcctgcctttccctctcaaatactggaattcaaggtgtgtataggcctgtgttgctgttggtgggggtggaaggggctgctccaagtatctcaggagtgtcccctagatataacttggtttctctcaagccttctaccccacaagggatgtttcagttcagaggagactgctgtagacactgacagttcacgtaatgacatattctagcagctcttgggtaagaagatagagatcttctgaactcagcttgcttataggactgttaactatacttggtcttcaagaccacagacaggttgctttgtaatactgcgttagctatacgtgaatgtttttgtgctttaatgatgaaggttttattcagtgtctttcctattacctcttctcagtgaggtactgggacaatatgtcccattttaccttctgtgttccgtagctgagaaacctgaggccttcaggggtttatttgcgcactggcttatagctgcttaatggggagggctccattaggctctaggttagggctcttccaggatgacatgtagtcaggaatccgtttctccagtcttttgtctttcatttgaattctgcttttatgttagtacatttacccaggaatggcctgtaggacacgctaccatttgaagggacagaattgcaaccctgaagagttaatgtttgttctttctttccttaattcgttagtactgtattggcaattgctggagaagatttttccatcgtcgcttcagacactcgattgagtgaaggattttcaattcatacccgagatagccccaaatgctacaaactgtaagtaaatctttctttgttttttgttagagatttacttttattttaagtatatgtttgttgtgtttgtacatatgtttggatactgggaattgaacccacctgggtcctttggaagaatagctagtactcttaaccattgagctatctctccagctcacaagtaaatattcataaagacatttcacttgctttcttggtggcagctgggaagattatccatgtagctaatcacaaaacgaagtggaagtggaaccaacagggcttgagtttttttgcaaagaaggttaaggtgataaggaatagagaataaggaaggcagctttgctgtgtgttggtcctaggcatggtctacatctgccataaaaagcagtgaagttttgtcttccttgttcctggctacccaatttttctaactcattaacagttctttcataaggaaattagaattagactttactagtcatatgttcatatagttttaatttcatatttttttctgtagaagtagtcagacttatgaaacatctatatgatccttgggttactgccccgacctgcgggacagccgaacagggtctgaggaacacctgtggagaaaagggggtggggggcgcgagaaacacaaagaacggacagcaagtcaaaaaaccctgatcaagctgacagattttctttttcccaggcaggttttatacccatagaagcaggctatggggagggggtgacgcagaatcgcttcgtttctgggggaacgcaccagttcccaaaagcaggatattggctaggtaaaaagttcagcaggaggaacagaacagaatgggttgctagatacctgtccacaagatctgtagttatttgttcttaagtgggggtagtactttcccacagaggcctcaactcacagaaatttctcacagaaatctcaactaagctaatacttttccactaaggccaaggcttggtaaataagcacttatggctgacaaggcagttaacattcaaacagggtcgctcctaacagattacatcatacttcaccttctctagtactagattataagtagtaacccttattttccttagcctaatcatagtatatcttcggcccacctaaaattaatttggtgtaaggagatgttggtatgtctgctcccatgccgcaaaagccctggctggttgtcagtttatgagccttgctttatcaactcattctcccgaaactggcttttacaggacagacaagacagtaattggctgcagtggtttccatggagattgtctcactttgacaaagattattgaagcaagattaaaggtaggtgcttttgaacatgtcgctctgttgcaacaattcacagcacagctgcatttagagagacagcaagttagcaggtgcagttagcatatcctagaaataaagcagagccaaccctggctgtggaggtcattcaggtaacaggaaactgcagcacaggttagaggtctgctaaagtctctgtgccttggcagggctgtctactgtatagagggctcttctgaagtgtgtcagatctggctgtggcaaaagacagcctgggcagcgtatagctaggagcaggatttggaactctctgctcaccgttctcctcctccacagccttccactctagtagacagcacaaaaggaggaaaaaataattctggaacgtggtgaatggtggtagcccatcacttggcaggcttcggtggtaggtatgatgtgatagggatgtttttgggggtaggggtgaccacattctctgttgcctactgagttcacttaagggaacataatctcatagtcatggaaagttcacttacatttcctgtggggctgtggagaaattatttcacagtattttagaacgttttgcatagaaagcttcagaaatttacatttattagcagatatatcatgccttctagtagtagttcatattttactataagttatcttagaaattatcctgtatttgtctgcttctagtcatatagctttttgtaatttttcagtgttctgaccttgacttacaattcttaggttttgctttagaaatgcttgttggctgattatgggatggatccccgggtagggtagtctttggatagtccatcctttcatcttagctccaaactttgtctctgtaactcctttcatgggtattttgttccctattctaagtaggaataaaatatccacccgttgctgttccctcctcttgattttcttgtgttttgcaaattgtatcttggtggtctatgtttttgggctcatatctatccaaggagctgaaggggtctgcacccctataggtggaacaacaatatgaactaaccagttacaccccccccccaagctcacatctctagctgcatatgtagtaggaagaaaggccccttggtcttgcaaactttatatgcctcagtacaggggaatgccaaggccaagaagtgggagtgggtgggtaggggagtagggcagggggagggtatagggaactttcaggatagcatttgaaatgtaagtaaagaaaatatttaataaaataaaatatgaagtcagataaaaagaaatgcgtgtcgtggaatccctttaaccccagtcaagagacaggcaggcagatctttgtgagtttgaggccagtctggtctataaagtgagttctaatgcagccaggaaggggttgttacacagaaaaaccctgcctcaaaaagcaaacaacgaaaatgatgaacttaattcattttatactcaaatttttgtggaaatttttatcctgattatataatttcatttattttattcgtatgggggtttgactacacacttgtacaccatgggtgtgcctggtactgggaggttaggaaatggttccagatgacttggaataggccgtgaatggttgtaagctgccatggaggtgcagaaccaaacctaggtttgcaaagcaagtgttcttaactcttctgagcagtccctctagtccccagggtcattctttttatactgttttccttggtagacaatttgagaagtaagactgcttccccttgataatgtggaccccaaatgatgcagtcaactgatttctgtttgtaagatactagatcataaatattttaaaactcaagggccatttcatttctgtcacagctgcccagttggattaagaaggcagcataaacaacttggttatacttgaggagaattttacttgtagaagcaggtagcagcaggtcaagctcctggtgctgataccattgtagtgcatagtgcagaaagagatacatttggaacaccttccccgggctcaccttacatgccctgcgtcttaaattgttgtggaattagtagtgtctgaaaggaagaggggagagtagaaaggctctttaaccccaccttcttgtcattcttcctcctaaaactctttttgttggttggttttaagaccgggtctctatgtagtcatggctgtcctggagtttgatgtgtagaccgggctggtcacaaactcattccttgaatgctgagacaaccgtgtactcactgtaaccactatagaacagaacaacaactcgacaaacaatgagttcactggttatttagaggagcatggtgagggcctacttcccgagcctgagctcctgcgcacagttgcatcatcctgtgcccatccagcatagacgacagttcaggaagcagccttcccctgagtccctcccatcagagtgatagttttcttttctcagcagttgttcatgttgtataaccttgaggaagaccctcttgaattttgttggtttcagctttcctggcatgtgtcaggtttagtcacattccgagttttgctcttcttttccaggaaatgtttgtgatctgaaaaacaagctactgagcatctcaaatatatgtaatgaaatattattttatgttagtaccattgtattatttgatcatgaaagaaataagcttttgtgtttcactaaggaatacctatagtgtgtactggttgttactgaagcttgacagattctgtttctactctactgaatctctctgttgtctccccctccccgccccccaatcctactaaaaataacccatgaagatgtacaagcattccaataacaaggccatgacaacgggggcgattgctgcaatgctgtctaccatcctgtactcacggcgcttcttcccttactatgtttacaacatcattggaggacttgatgaagaaggtaacagcttgctttctggcaaatacaaaagtgttatttcataaatgtgtgtgcttctgcctggagttgtgctatctagcccagcagctttgctctttgatcacgaaagtacaacaaactgaagctaaaagagataaataccactcagtgacatacagcaaggatggtatctggtgcctggtgacctgatagttatttgttttttcaggatctggtattgatagctattttctttcatcttacagattacataacatagttaattcaaatagtcctttttaaaaacatatttttattttatatgcattggtgttttgcctgcatgtatgtctgtgagggtgtgagatcccgtggagatagagttacaggcagttttgggctgccatgtggcttctgggaattatacccaaatcctctggaagaagagtagccactgctcttaactgccaagctatctctccagccccctcaaacagttcttgaaaaggaatttcaggggctggacgaactcgtggttaagagcaattctgctcctacacaaaggcttgaatttagttcccagcaccaacatggtggctctcaaccatttgtaactccagtccggttccaaggggtctgatgccctctggagatctgatctgacctctctctggggatgtcaggtgtgcacgtggtgctcatacagacacccacaaaggtagcccacaacagaccaaagtccagcatagtgaaccaaggagtcttattggggttccttacaggacagtgggtgaggggttccttacaggactgtgggtgaggggttccttacaggactgtgggtgaggggttccttgcaggactgtgggtgaggggttccttgcaggactgtgggtgaggggttccttacaggactgtgggtgaggggttccttacaggactgtgggtgagggattccttgcaggactgtgggtgaggggttccttgcaggactgtgggtgaggggttccttgcaggactgcaggactgtgggtgacgggttccttgcaggactgtgggtgaggggttccttgcaggactgtgggtgaggggttccttacaggactgtgggtgaggggttccttgcaggactgtgggtgacgggttccttgcaggactgtgggtgacgggttccttgcaggactgtgggtgaggggttccttataggactgtgggtttggggttccttacaggactgtgggtgaggggttccttgcaggactgtgggtgaggggttccttacaggactgtgggtgaggggttccttgcaggactgtgggtgaggggttccttgcaggactgtgggtgaggggttccttgcaggactgtgggtgaggggttccttgcaggactgtgggtgaggggttccttgcaggactgtgggtgaggggttccttgcaggactgtgggtgacgggttccttgcaggactgtgggtgacgggttccttgcaggactgtgggtgaggggttccttgcaggactgtgggtgaggggttccttgcaggactgtgggtgaggggttccttgcaggactgtgggtgaggggttccttgcaggactgtgggtgaggggttccttacaggactgtggctgaggggttccttacaggactgtgggtgacgggttacttacagggacagagatgactcaaaggcagctgcatcaccaaagctggaaacttgcagcacacttacagcctgcagggtggacagtgtcccttctagttaggtggtttagttgagcgacacattcccaggctgcatctctcctccttttttgcagcttggcttttcatgaacatgactggtggtaatatttatttactcttgatagaggggggtgggtcttataaatctggtctgtttcaggggcttcctgaagctgttctaagttgttgacttctgtcttagcttccttccctgcaggataaaatgctttaatcaggaaggaaactgctacacagcacattcgtacatttaggcaaaagacagactccttaaggagaaataaatctgttttgttgttgtttaaaacataatattgtaatccgtgcctataacttggcagctgaagtggaagggttgtatcattcatggactattcaagaccctgtcttcaaaaacaaaggtgatttgagtgagttagtacctctagtgctctcagtgtatgtatctttttttatttttttttctgtcagagtaagataggatatattttttaagacttcagctggatctggtggcacatggaatcacagcactcagataggcagaagagcctcttgagtttgaggctagtctggtctacatagccagttttagaacagctaggactgtgtagagagatcccatctcaaaaaaacaaaacaacaacaaaagatttttgcgtgtctgtgtgtttttgctccccagtctcatttttttttagttcctggagaattttgtgcagtgtattttaatcatggtcacccatctcccgttcctcccagatacaccactctctagtttccttaccatccaacttcctagcctctttgttttcatctttaaaccatcaggtacagttgttgttactcatattctcggatgtgtggtcttccactaaaatgtggtcagcctgttaggggactcacccttaaaactgactccctctaccaatccctgtcagttgcctaaagctccttggctagggtggtacttcttgtctacttctctatgctggcatgtttgtctggcttgagcttgcttgggtcttgtatacaaatcacaactgctgtgagttcttgtgtgcaagtgtccctcagtgtccagaaaagagtttctttgtagttaacaccacctcgcgcaatcttttcactcacataaatatgtataatgggggctggagagatggctcagtgttaaagagcaccgactgctcttccgaaggtcctgagttcaaatcccagcaaccacatggtggctcacaaccatctgtaatgagatctgatgccctcttctggtgtgtctgaagacagctacagtgtacttacatataataaataaataaataatgtataatgataactaaatctcaagaaaccgttgtaggggctggagagatggctcagtggttaagagcactgactgctcttccgaaggtcctgagttcaaatcccagcaaccacatggtggctcacaaccatccgttaagagatctgatgcccaataaataaatcttagaaagaaaggaaggaagaaagaaagagaaaaaagaaaccactgtagaagattgactttttcattgtgtgtggagatgtgatatgcatgtaagtaagtgtgtgtgccttaagtgtgtgagaccagatgtgtcagagctgctgtttattagaagctgttgtgagctacccagcaggtgctgggaatccagcactaagtacaaatcttaactactgagccatctctccagcccagatattcgttgttttaggattgaatctaagacgtaagaaaaaaaaatcagtctttaggagtggtggtataaaaacaatgcattatatgcatgtataaaattatcaaagaagtaatttataaaaattatacaaccagtatctacaataacttttttaaaatagcaactttaaagagaaaccagtctgtgtgactggttttctacctggatctttttctacctggatcacagcagggagctcctatgatggaatgtaggtgaaactgagggctttgcctcagggctagtacatttcacccctgcctttcctctctccatggtggatggctcctctgagcctggtacatggtgcctcctggattgtttctgaccatcacaaagaagtcctttaccttgccccttgctttgaatctggctcctcccccccccttttttttacgatttgtttatttttaatgtatatgagtacactatcactgtcttcagacacactacagatggttgtgagctaccatgtggctgctgggaattgaactcaggacctctggaagagcagtcagtgttcttaaccactgagccatctctccagctgccttgagttcgtttgttaagctttctttttctgtctgctttggtggtgtatgtctttcccctggtctagtggaggggttgagtatggtttttggatctttgctaagtccttttgcttggttctgacacttcacagtggccctccaggttgttcctcttcactgtttcctcgctcttgtcgtccttgccgtccttgcttgcctgtcctgattttctccacaactgcagcttatttgttcctcattcttgttgcctgtggatagtccatctttttgtcttatgtaaaagtaacttttattctcttgatgtcagagggttgcttcctctgtctgctaacctgggcttagtcctggaagcttgtggcttaggcctagattttttcagcctctgagacttgttgctcatcctttctagttgtttctgaacttgggctggctgattcatctcagctgttctggcccaacactggcctctctacgctgactgattgaaactggcttttctcagcttctgactgaattgctctgcttggcctcatattaactttggtaatatgttgtaatcttctggctccttctcagtctctggcttgttctgtcctcacctgtgtctggcttgttctctgcagcctgtctctgtacccagtaaaactatcttaagtctcctctcttccccctcgtctcatgagagttgggatagcctgttctgtcaaatcttattcgtccttttctgccgctcactgacatcattttcaaatatgggtgcttcttctaaaactaactttacctttattgtttgagattaaagatgtacgctaaggctgagccacactacaactagaaataggttttcccagtaaacaacacaatcatgggatttgcattgtgatcagatttcctgcaaaaatcttgttctgatttttgaaaattccctcctttattttttaaattctgttgttacttttatttctagtgtcttttaagtttttaagaattatacttttgttactttattaggagttctgcgttctctacattttttttttaattcttgtattctgtattttatactggggctcttaattataatggggtgttaatttagggctcttccttcatcatgaaaagtgatgaaaagtctgattagtagtcctaagcagtattctagtatacattattactactataacttctaaacatttagttctttgatgatttcatacatacatatagtacattacagttcccatatacctcatgatgagtgatctttagtcttctaggcttacagctggagctttttgtaagtcagttttctgtctctgttttatgcttctgatctttcctgtccactcagccaaggtcaccaagtgaactaaaatctcaaaagacttactggcttttaggcagtaggatgggtgttaagtatagttttcttaccttttttgggatttgaaataagtcttactgactttcaaattttcagttgaataatccgatgtttgtctgatgggtctacctgtttttctcttactactttcactgtgctctttgttctttatactgctgtgccagggaaatgttagtgatccccaaaaacacacagaggagccaattttttttttttaaatctatctatttatttatttatttatttatttatttattatatgtaagtacactgtagtgtgtcttcagacactccaaaagagagcatcagattttgttacggtggctgtgagccaccatgtggttgctgggatttgaactcaggacctttggaagagcagtcggcactcttaaccactgagccagccccaaaggagccagtttgatgcagctcacagcagggtctttattctatttgagctagcttggggctcccccgcaacccacctcaggacgggtttggtgatgggagagccctgaatgtctatcagggcaaggctttgtagtaaacagcaagcagggagcatgtgtgcaagcatctaattagaaagctcctgtggcctttaacatgattggctggtgctggaagtctatcatagacttaacttcggctcccctctgcattggtggtcattaccagggggtgggcttgtaacctggggtgcaggtttgttgggggaataacctggagacactggtctggttgagggtgtaacctggagatactggtcttgttgtgggtgtagcctggagactagaaacatcttcctgtccttggaaatatataattacataaaaagaggaaagatcaaggacaggaagatgtaggaattaaagggggagggtgtatgaggtgtggctaaagagtaaaaaattgcctttggggccagcctagtctacagaggaagtgtctgactgctaggactagacagagaaaccctgtcttcaaaaacccaaacaaacaaaaactcctaaattatatacaaacaaaagcaaaaccattatgaaacatatgcaagaaagaaaataataataagaaattaaataatagagaataagagataaagggaatatttgtaaaattaattgctggcacatctgtgctgacttgaaagtggggtgctcaaaacaccctggtgtgctggaagggagactgggacacattttccctgtagtctgtgttctcgggggttatctggggctgttgaagctagaggcctgcttctgtggtcatctctggtttcaccagggatcttgatccatagtttcttgtggtttgggtttgaggtttttttgtttgtttggttttttgtttgtttggtttttttttgtttttttttttttaaggtctcagtctatagcccaggtttgctattatcctcttattccagcttctcaactgacagtattacagacactccacagttggttttgttttgttttgttttttcttttttgtttttcgagacagggtttttctgtgtagtcctggcagtcctggaactcactctgtagaccaggctggcctcgaactcaaaaatctgcctgcctctgcctcccgagtgcttggattaaaggcgtgcgccaccactgcccagccttttcttttcttttcttttcttttcttttcttttcttttcttttcttttcttttcctttcctttcctttcctttcctttcctttcctttcttttcttttcttttcttttcttcttttttctttctttctttcttctttccttccttccttccttccttccttccttccttccttctttctttctttctccccccctctctctttttctttctttcttcttttttgttgttgttagcacagttgtttttaaaagacctcttctaggggccggagggatggcttagtacttgctactctttcagagactgcaggggttaagttcccaggacccatatggcttctcacaaaggtctgtaacttaagttccaagggaaccccgccctcctctggcctcactatgcacatcatatacctacaggcaggcaggcgggcaggcaaaacactcagacacagttgttaaagactgtctaaaattgtagtgatgtgttctttgataaaaattccaggtctatatacgcatatggtactgtcttagttagggttttactgctgtgaacagacaccatgaccaaggcaagtcttataaaaacattatttaattggggctggctcacaggttcagaggttcagtccatcatcatcaaggtgggagcatggcattatccaggcaggcatggtacaggcagagctgagatttctacatcttcatccaaaggctgctagtggaagactgacttccaggcaactagggtgaggatcttaagcccacacccacagtgacacaactactccaaccaggtcacatctattccaacaaggccacacctctaaatggtgccactccctggcccaagaatatacaaaccatcacttgtaccttccagtttttctcaatagtagaaattttaaaagttctgttttaaagtcagttccttggatggggtgtgtttgccctggtgcagatatgaaagtcagaggacaaccttccaaagctggttctggcctgtcacaaggtaggttctggggatcaagttcaagtcaacaggctttgcagcaagtgccattaccaagtgccctggcccagtctcatcagtgtgctaactcatgctgagcactctgaggctctgaggaggttaagtatattaacctcttcagtaactgtgaccaacaccctgaccacacaaggtgcagcagagtgcagcagctggctccaaggtttgcttgctttaccttttagacagtgatgtggttttatgaatgagtgccacctttctaataacttttaagatgccttttttttctattttgaatactgcagaaatatctacctatgttagaaacaaacaataatttcagtgtttcacaaagaattcacaaagtcaaagtatcaaaccaggctggcaacacaccagggttgttatcctgatttttttttcatccttggtgatagtacctcatcccattagtgaaaactccgggtcactaactggcacaattggctaatgggcatgaaaattcaagaaaagtgattccttaccaggctgctttgatttacatctttttcttataaatgtgtaataaatgtatatatttacaattatcttttaggataaatcctgccaaaaggcatagtttgatttcagtggagtctgtaaggactgctggttggtttgttgtattgagttatgtttctcttacaggaaaaaaaaattactcttggcctagagagatggtttagcatttagagtctttcatgccctcagaggacccgtttggattccagcacacacactgggcaacttacagttgcccgtgactcagtcccaggaaatctcttggccctcatggatacctatacatatgatgtagacattcacatagatatacacataaataaaagtaatctctattttttaagttattccttattccagtaattcaaggcaagctgtaacattttgggcaaaacaaagcgcttaatagtacgcatttgtgttttgctaaaactctttattaaatattaaataaaaaattaaatattgccattaattagaaattggtggtatttggcagggatggttctcgctctttacctgagtctaccaaggattcactatcctcctgccttagcctagaatatggtgtcttagttcgggtttctattgctgcaatgaaacaccatgaccaaaaagcaagttgggaagaaagtttatttggcttacattttcatactgttgttcatcattgaagaaagtcaagatgaaacagtaggaacctggaagccatggaggagcactgcttactggcttgctcctcataacttgatcagcctgctttctcatagaacccaggaccactggcccagagacggcatcacccacagtggctgggccctcctgcatcaatcactaagtaagaaagtgcactacaggtcaggcttcagcctagtgttatggaggcagtttttcagttgaagttgtctcctctctgatgactctagcttgtgtcaggtcaacataaaactagctgatgcaggtggttttttacagtatattgttaaaaggtatgttcatcgaatactaaaatgatagacaataagtctgtggttttattacttagatttagctctaagaagaatttaaactattgggtttatgctaaaactccacaagcttatttgttagggatagcatgaagcttttggttagaacttcaagtaaggcctgtgatcattacccaatgtgtctgaatggcctgcctgcccagggccatgggacagttgtcaatgacattagttttagacaagttgaccacagggttaggtcactaagatgtgaacctcttgtctctgacctcattccataaagaatagtctgctggggtccactgcaccacagtaactgggttctgacctttgtcagaagtttagctaagtggctagataacactctgcatcatgttttgacttccttttgacagtgttgttgtactctttcttctttaaggaaagggagctgtgtacagctttgacccagtgggctcttaccagagagactctttcaaggcgggaggctcagcaagtgccatgctgcagcctctgctcgacaaccaggtaatgtgcttgagcagagctctgcctgtggcagcgtgggcagctgtggtagcctccagtttctcattctgctgagatgctgctgaggtcttctgacgccgctcttttctctgctctgtcagtgcccttcagtcctcagctgcccatggctctataggctctgtctgcagccattggtcatgtctcgcttatcccatgccatcttaccttacatcacacaatgcctccttcattacccttactgtttctgggttatagtcgattccccaaacttttaatttgtctcccccccccctttttttaataccaccttgatccagacctgcgtttattgggttttctcagaggccttcagcctccaagctcagtaacccaatccgtgctgcctgtggttcctgtgccttgctttctgctgctgtgtgttcatctcacctgtgccacactctgccttctcctatctgatctcgcgctttagttagcaatgtttgatgctcttgtagttcagtgccttctcctagttttgatcctactgccattataagagtaccatgaccaaaagcaacttggggaagaaactcagttcatttcagtttaagagcttgtactctgtaatggagggaagttgaggcaggaactgaagcagagaccctgaaggaatgctgcttactagcttgtaataactggctcaaactgcttccttactcacctgcccacagtgggctggggcctcctacatcaagcattaatctggaaaacatcccacagacttgcctgcaggccagtcttgtggagacatgttctcagctcctagataaccctgcctaaatttttctgatggagctgcctaggccccttcttcctccttgttaaattttttacattatctgtatctgcctccatgtgtttgtgcttttgagaaattgggagcattgccccatttctgttgtatttaagctgggactagaatatccttaaactggaagacatcctgatgtgacttgatacatccaattcaaatcctgggacatggggatgttgtatgctgtgggaggttggggccttaggtcttggggacacgtgatgctccatgtgagtttctgtctctccaggttggcttcaaaaatatgcagaatgtagagcacgtccccctgacgctggacagagccatgaggctggtgaaagatgtcttcatttctgcagccgagagggatgtgtatactggagatgctctcaggatctgcatcgtgaccaaagagggcatcagggaggaaactgttcccctgcggaaagactgacatgcgggtcatatattggagctgtggcacaagtttgttttattaaaaagaatgtaaagtactcattttcttacactgtgtcttctctaagcatggcaaattgggaagaatttcttccttaggggtcggagagacaactctcagtttaaaaagtatggctcttgcagaggacctaagtttgattcctagcacccacctgtaactccagttccaggggctacagtgtcctcttctggcctcgacaggcacatgcaaatacccacatacaaatgtatgtaatgaaaaataaaaccactaatataatttctttttctttatctggatatatttatttattttgagatttacttttcatcatgtgtgtgtttccgtgagcatgtgccacgtgcatgcatatttatgtgaacagggtatgcaggtgcccagggaagccagaagcaggcgtcagttcccttagagctggagttacaggagctatgagctgtcaaatgggtcatctagaagagccacacacttaactattgagccatccctccagccctatatttttgtattttaagaataaggaaagtgggactaaggaggtggctcagtgggtgaaggtgtttgccaccaagcctgacagcttgagttctgacccttggatctctgtggttaatttgttttctggctaatacatacacatcttgttttttaagatttgtgtgtgtgtgtgtgtatgtgtgtaatcatgtgtccgtatgcacacagaagccagaggatggtgttgactcctggattggaatgagaaaccctatatggatgtcttcagcattaggattttacatacatttacatatcatttacatccacacttacatacactattttgaatacatgtggacatgcaagtatctctactgggatataagtttctttgggtatgtgtccaggaatggtatagctgggtcctataaaacctgtttttgcttttttttaataaacttctgttctgatttccatagtggctgcactagttgacacaccaacaatgtgtgactttacccaagtcagtgtcagtacttgtcatttgtattcttgatcattttgtttgtttgggttttttgagacagggttcctctttgtaacaacctctggcagtcctagaactcattcagtagaccaggttggcctcaaacccagatctgtttccctctgtctcccttcgagtgctgggattagagatgtgtgccgccactgtccttttatcttcttgatgatgttcattctgactggtgggagatggaatctcaaagtggttttaacctgtatttctctgaatgctaaggatgctaatttttaaagtgattactacctgtttatatttcttttgagaaactttgcttatttctgtcctggttagttttgttttgttttgtttgttttgttttgtcacattaacagcctggagtaacatgggaagaagaaaccattatgacagactttatgcaaccagattggtctgtggtcatatctgtaagaaatcatcttgattgatagaggaggccctagcccactgtggacagcactaacattagggaggtgaggcttggtctgtataagaaagctatctggggctggagaaatgtctgactgttaagagtctgtttctatacttgattttcagagcccgtattaggtggctcacaacagtcagttccagtggatgcaacacttttctggcttccgtgagaatctgcacacacatggcacacacagaggaacatgcatgcacacataagttaaaaaaatatttttgaaaagtgcttgcagcaaagaaagggaaagaaagctagctgagcttgagcctgtgagcaaggcagtaagtggaatttttccaggattcttgtcccaggctcttgccacctggtcttttctcagtgatgcgttgtaaccttggagtgtaagccaacgggttctttcctgtggtgctgcggtatcacagcactgtaatgaaagtagaacagaaactcgcaccaagagtagcgtcgttgtgatgaacctgtgttcatttggaggagtggggaaatgtttggaacttagagctggaaaagccattgagtcctaggaacttggtgagttgttcagtagtaacttggaagatagtgctatgaaaaacatggaggctatgaaggtggattgtgatgccttcgaaggaagaaagatgatcggggccatttggattaagaatctgtggttgctttttagttaggaatcatttgtgattaacaagataagcagcacccgttagatgaaagctttgagttttactaggacttggattctggtcatctggggctgaaaatcagctgtggttaataagaaatcgttatcattgaaataaaatctggaaagtatctattaaggataagcacacaaactgatctagtggggtcaagtctatctcaagctgttagctgaatttggcaaaatatctgtaagagtcacccacctgttactggttttaaaggcaggaaagctcttgattgaaggggtcataaagagaagctgaggactggcaccctgttgcagggttggggtacctgcagagaggcccaagaagctattggtgaaggcagaacatgagttgtagcagatattggagcagctcggacctgggatatctgctaagaacagtggtaagtgtgggatgaatctgacctgagcctgtactaccaccatgtgtgctggggacagcagagttggagagccctttagagcccagaagagtgtattgtaaaaggacaagtggacatgatagacattgatctatacagctagacttcggttttgcttaagtgtgttgtttatgtaatttatctttttccactgaagcccatatttaagggtctttgggtttatgaatgaatgaatgaattttgtgacaaggtctctctatgaagctttagttgacctggaattcactatgtagaccaggctgggctcaaactcacagagatccacctgcctctgcctcttgagtgttgagattaaaggcatgtgctgccattcccagcaagactagatttaaatttaaaagagaccttgtactttttaaagagttatttatttttaatgtatacgagtacactgtcactgactcaccagaagagggcatcagatcccattatggatagctgtgagccaccgtgtggttgctgggaattgaactcaggacctctggaagagcagtcagtgctctcaactactgagcgatctctcaagcctgagactttgtactgtttttgtttttgtttttgtttgtttgtttgtttttcgagacagggtttctctgtgtatccctggttgtcctggagctcactttgtagaccaggctggcctcgaactcagaaatccgcctgcctctgcctcccgagtgctgggattaaaggtgtgcgccaccacgtccagcctgagactttgtacttttaaagcattggaattttaaactttagttttacttgtaagagggaggcgggggaggtgtgtgcacatgagtccaggtgcccttggagaccggaagcatcagcttccctggatctggagttccatctgacatgggtgctaggaactgaactcagttcctctggaaatgctcttacctgctgaagcagctcagttaaaaactttagacaggtttttaaaattgcattttataaattgcattttactaacacgaggaaatggtgacaaacaagtagaaggttatggtttagcagtggttggtttgtgtgctaagttggcaaggagggaagcagcctgactcatctgggaagagggactcccagctgaagagttgcctggatcagactgggctgtggctatgtctgtaagagatccatatgtaagggctcagcccactgtgggcagcagcatccctaagtatgtaggcctgagctatataggaaacgtagctaactataaggcccagaacaagctttagaacaaaccagtaaggagtactcttccatgattcctaccttcaggtcttccttgagttcctgccctaacttcttccaagagactgaccgggaggtataagccagataagttctttcctccacaagcctttggtcgtgatgtttaggaaagcaacagaatgaaactaaaacacttccataaccaactttttaaaattaggatatggggctgaagaggtgttaagaacacttatcagcagttaacacctgcttttccagaagacccgagtttagttctcagcccctgcatggcaactcgagaccatctctaacttcagacccagcggatctatactaccttcttttgggatatgtgggcaacaggcatgtatgtggtatatggacacacatagaggcaaaacacctgtacacataagcaagaaaagtaaaaaaatgggttattttaaaatttaatgggtttgtgtacacacacacctgcgccatagtgcaaatgtagaggtcagaggacaatatatcagttctctctttctactagatggaccctggggatggaacatgggttgtgtggccatttccttattgatacattccaccctgcaagtaagtaagtactttaagacagaaggtaaacaaataacttaaaatccttgaagggagtccctggaactgaccagattcactaagatcccccctccatgattaaataatacagacggttgagagttactctcagacaaagcaagctacaaagaagactgtgagactagaccagtcacctgttgagctgcctgcaggctctacagtacagtatgatacaagtttccagcttctatgagctgtcatctgtgctggagtgggctttggttatgcagctgtctttgagtcatttctcctcctataagtaactctttacccatattctcgtaaatatcctcaataaaattcattggttcaccaagttggacttgtctactgagggcttcctttggatggtgaggagatggtaggttgcctgcttcccctgtgtttttgttgtcactgtgttctagttaatgaccctctgtcaactgtatagcagagagtttctaccgtgagctgctcttcacttggttgacttttctttgttgtacggaagccttttgttttctcaagctctcgtttgttaatatttagtcttatttcccgtacgactgctgtcctagtcataaagttctctatgcctatgtggtgacgtgtactctctttaaaattttttattttgtgtgtatgggtattttgtctgcatgtttgtccgtgtaccacggaagccagaaggcatcaggccctgtagaattttatatgcacagattgggagacactttctggatcctgggaatcgagcgcagagcctcggggagagcagtcagtgatcttaatcatctgaatcaactgaatcatctctgactccatgctgcctactttttgctctacatgcttcagagtctcaagattctatggtgaggtgttaattctatatacatttcccagcagtgcttgctaagagattgtcgtttctgcaatgtacatttttggcatccatcactgttgaaaccaggtggctgaagatgcatgttcttagatctgggctttctattctgtccatctagatgtctggttttgagccagtaccatgctgtttttattactgtggctctgtagcatagcttgaagtcaggtatggtgatgccatcaactgttctggttgtttggcaatcttctgtgcttccatattaattttaagattttttttgtcctctatatccctaaataatcgttctaggatttttactgaaattgtattgcatctgtgttttaggttgttagagtttctattactgtcatgaaacatcattaccaaaaagcaagttggggaggaaagagttaattcggtttgcactcctacagcactgttcattattgaaggaagtcaggaactctaaacaaggcaaggttctaaaggcgggaactgatgcagaagccacatggggagtgctgcttactgacttgttcctcaagacttgctcagcctgcttccttatacaacccaggaccaccgacccaagcatggaaccacccacaaggacttgggttttcctacatcaatcactaattaagaaaatgcctagggctagagagatggctcagtggttaaaagcactgactgttcttccagagatcctgagttcaagtcccagcaaccacatggtagctcacaaccatctgtaataggacctgaaggcctcttctgtctgaagacagttacagtgttccattcataaaatacatttttttaaaaaattcttttaaaaaaaaagaagaaggaaaaggaaaaggaaagaaaatggcttatatcggggtcttatggagatatttccttagctaaggttcccacttttcagaaatctagtttctgtgtcaagttgacatgagacaagccagcacacatctgtattttgctttttgtaagatggctatcttgacaattttaaattcttctaatccatatacatggacggtctttctatcttctcacttcccccttagttcctttcttcagtgtctttaaaggttttcttgtagaagttctgttgtttacttagttaagtttattccaaccaaaatagtgtgagtggagtggataatatctcttatattaaaactatttcatctacaaacaggaatatttttactttcctatttgtatctattttttcttactgctctgagactcaagcaccgtattgaacaggaatggagaaagttttatttttattttagtaaaaatgcttcaaatattttttacctttaccataatgttgttgtggcctcgttgtatattgactttattatgttttgaattatgtcccctatatccatagattctgtagcaaatatctcatgaagagatactggactaatcaaagacctttcctgaatttatttggtttctgtccttgagtctatttatatgacaagttacatttattgatttatacgttgaatcttctctttaatgaagtcaacttggtgctgaatgacgagatcttgaattagtttgctagtatcctactgagaacgtttgtatctgtattgatcagagagatcagtctataattttcttaatgttgtctctgcctggttttggtatcagtatgatattggcaaaagaaaaaaaaaagcaaaaccggtttggaagtttccttccttttctactttatagggtgatttgcaaaatactggtctccattcttgagtgaagggtagagatctatacagtgagtacatctgaacctgggtgttcttcagtcaggagatttttatgaccatgtcggtcttgctgctggatataggactatttaattttttttcattttgatttgattttggtaggtcatatacctatcaatttcatccatttctcttagattttaaaaatttagtggaatataggtttgtaaggtatgttttatgcttttcttactcttggtatctcttgtaataacttcttttttcatttctgatcttacaagtcttctctgtcttttagttaacttagctaagggtttgtctgtctttttaaaaggtttatttgcctttttaaagaaagaactctgcatctgattctttggtttgtcttgtactcactatttctatttcatgaatttctgcccttaagtatgtctccttatctactgatttggagtttgatttgttctgacttttctaaggcttcaaggtgcatcattaagttatttgagttttctctgtttttttatttttaaaattttgggcgcttagagatacgcactttcctattaggaccgctatttgttctcgggtggatctctagaacttgtgaatcatctttagaaaatttttcttccatgacaggcaagtatttagaacttcatttggagtgtgggctgatgactgtaaggcggattgttggtaaacaccactgttttgaactgggactccactgtcacctcaagcagacccctgacctgactcctgctttgagatgtgccacaaagatggctgaggcctgtcaaaggatggtggctattcctcattcatgaatgccaggttctgtgtcacgctcctggaggaggccaccaggtggcgctgtggatttacctctggtgcccccactttgtggcgagcatttcctaggatagagtttagtttgtggtaggcaggaaatagaacttgagtccggtagtaaatactgttcttccttaacttggcaaaaggacattttgtggtaacttgtaatctcagttcatgtacatattaaactgcagaggacagaagaagataaactggtcatcactgtactggatgcatgcgaggtgtgtgtttgatctggaggggagagaaaagaagacagaggaggaggagaaagggaactgactttgacacaaaaagacaaatatcagaacactggatttatttggagctatatacttgtaaaagatgggtctcactaggtatatagcccccgctgacctggaactttctatacgtaccaatttcaaactctgagatcttcctgcttctgcctccccaagttctgggattaaaggcatgtatcatcaggccctgtgattgttttttattttttattttaattatttctaaagcaatagacagatcctatttttcttctacattctcaactctcctattggtattgtacctgctttttagagtaggttgttgagaatcaactgtgacacctagaaggtaaggacatggctgggctgtggtagtcttaccaaattttcacgtcatttagaatattaggaacacacatctacagagcccaaacatgggctagctccaggtggcaactataccagcctgttcttctgcccttgggagtacagctttcatagtctggaattttctcccatcatggcaaagcctacacaggacttgctagcattttgcactccaggtggggctcaaatgttttagacttagcacaacatcccctggaaattgtactttctttgtaaagcttctcagtaagattgcttactgtttgcagagactctatgaaccactatgatccacaaggagagactaggaggaggttctaagcagcggttgtggaacgcatgtgaacagcaaagctgttgacacgatgtttctgttctattctgtaaagaatgtgttcgtgcatatagacataaagcagatgcttgggttttaaaaacgttcctctatttctttcttatttttaaaaaagattttatttatttatttattatatgtaagtacactgtagctgtcttcagatctcattacaggtggttgtgagccaccatgtggttgctgggaattgaactcaggacctctggaagagcagtcagtgctcttaaccgccaagccatctcaccagccctcgttcctctatttctttatcgtgtaatgaaacataaactgagatggcatcactggtcattatcatatgtaacctacagtcacaaagagaccaggtgttcctcaagggacagcgataccttttctaaaatacataatacattttcggttgtatttgagaaagttatatcatattaggtagaattatgacctgattatagctttcctttgggaattaagcataacagaaggatatgtaatttgtgtgtcaagttgacccagggtatacttgtgatagctaattttgggttgttaactgcatctagaatcaattaaaacccaagctcctgggcgcacctgtgagagactcttgattggatcatttgaggtggggagaccaatggtaaatccgtccgatactttctggtggcagtgcacataaaaggccgcaactttaacctttcccaggcttgcccccactctccctggcttgcccccactctccctggcttaccacctacttcttcctgattccaacactgactgaaaaccagcagctctccaggaatcctcagggactaggttaaaactaccagattaggactaccaagatatgtagaacaacaactggtgtacatacacacacacacaca

SEQ ID NO: 147 - DNA, 800 bp, Mus musculus
cagcaggagttaggcgcgatgctttccactgctgcttaccgagacgtggaacgagagctgggaatggggcctcacggctccgccggccctgtgcagctgcggttttcgccttatgccttcaacggaggtactgtattggcaattgctggagaagatttttccatcgtcgcttcagacactcgattgagtgaaggattttcaattcatacccgagatagccccaaatgctacaaactgacagacaagacagtaattggctgcagtggtttccatggagattgtctcactttgacaaagattattgaagcaagattaaagatgtacaagcattccaataacaaggccatgacaacgggggcgattgctgcaatgctgtctaccatcctgtactcacggcgcttcttcccttactatgtttacaacatcattggaggacttgatgaagaaggaaagggagctgtgtacagctttgacccagtgggctcttaccagagagactctttcaaggcgggaggctcagcaagtgccatgctgcagcctctgctcgacaaccaggttggcttcaaaaatatgcagaatgtagagcacgtccccctgacgctggacagagccatgaggctggtgaaagatgtcttcatttctgcagccgagagggatgtgtatactggagatgctctcaggatctgcatcgtgaccaaagagggcatcagggaggaaactgttcccctgcggaaagactgacatgcgggtcatatattggagctgtggcacaagtttgttttattaaaaagaatgtaaag

SEQ ID NO: 148 - protein, 244 aa, Mus musculus
QQELGAMLSTAAYRDVERELGMGPHGSAGPVQLRFSPYAFNGGTVLAIAGEDFSIVASDTRLSEGFSIHTRDSPKCYKLTDKTVIGCSGFHGDCLTLTKIIEARLKMYKHSNNKAMTTGAIAAMLSTIKRRFFPYYVYNIIGGLDEEGKGAVYSFDPVGSYQRDSFKAGGSASAMLQPLLDNQVGFKNMQNVEHVPLTLDRAMRLVKDVFISAAERDVYTGDALRICIVTKEGIREETVPLRKD

SEQ ID NO: 149 - DNA, 40783 bp, Homo sapiens
ctactatagctggctaacatcatccctatacatatacaaaattcttcacatgatcccaatacaatacatatataacttagcttattttatagactgctgtactcccagggattcttatatcacagacactcaataaaagatacaaaacaatgcacattttactttagatcttcattttattggtgtcaaggaataagcataacacaaactctttgatatacagattttttttttgaggcggagtctcgctctgttgccaggctggaatgcaatggcgcaatctccgctcactgcaacctctgcctcccaggatcaagtgattctcctgcctcagcctcccaggcgcatgccaccactcccggcaaatttttgtatttttagtagagacggggtttcactatgttggccaggatggtcttgaactcctgacctcagatgatccgcccacctcggcctcccaaagtgctgggattacacgtgtgagccaccaagcccggccaattttttttttttttttaagagacagggtcttgccatgttgcctgggctggtggtgaactcctaggttcaagaaattctccttcctcagcctcccaaagtgctgggattacaggcattagccactgtgcctggcctgatctacagacatttgttttatagcgtgaaatacattaaaatatagagacacggcagaggagacaaaaaagaaaaaaaaaagaaatacattaaaatagatctaaccttgggattatattcggcgtttcgggcacgaagtgcaatggtctttaggtcaagtttacaaccaagattcactgtggatacaatatttctgtaagagatttaaaaagaaaacacgactatttaaattacttaagtttcattggatgaggcgttagaaattatgcagacatctgattatttcaaccaggctttacttttttttaattgctcacatttattgtttaacaagtatcatgcacatgttgagcattttatatagattattccatttaatacatataacgcactgaggtagaagttaccagtattcccacatttggataaataagctgaggcttaaaggtagagtgcaacttgctcaggacgcaatggctcccaagtggaggagccaggatttgagtctgtctgtctccagagcctgcccttagccttctcacagacaaactcaattctcatctgtgagctctgaaaagctaccaccaccaccctattcctaagtaactatttataatgaaaacaagcaggcatgaactgcccagttctctcaaagtaagtatcttttgaaaaacaagagctaagtgtctttagcaaaaaaaaaaggcaaaaccctgctttctcttctaattaactctcagtaaataaggataaatggagccatctgggtccactgacccttttcatttctcagtgttcttaaatcacttaacgaataacttatacaaggataaagatatactaaaaagcaactctattagaaattttaataaaaatttaaacaacaaacccacattttcattatacatttttctgcttatgaaagtatatatagttgaaatgggcaatgccctttgaatgcaattaactgctcaacaactgtctcgcatggacctggaaatcaccatcccaagaatatcgagtccagatttcaaatacataggttcaaatacaataggtttcagctcattgttgcttctggttctttttcttgtacagtctatgatacacaactgtaaagccaattaggttgatccacacaatgaatgttttcatttccatatcatctatttccttccaatcacccttgtatacacacctgcctttagcatttgtccacttatgaactataccaagtagattttagtatatctatcacaactttagtcacataattgttaaatgtattcttatatattttcattaattaaatatttaccttaatccctcttaagcctacaagatggagagggcactgaactaccacccgggagggttcttagtagatagtggaaattcaggaatgtggatgactggatgctctggggagtatcagaacagcaaaggcactcgcaagaaacaaacacctgactgtactgtttataatttattatttaaatcagaaatgcaaacttaaatattcctgggagtcagacaagcatgctggacacatgggagtggtatagacaagggtgagctaaaaagggctctctctaaaatcactaaaattactttgtttttaaaattgtgtgtggggtcaaacaaaattgtggaggcaagatttaggtctttgggtgaaagtcagcatccacgattacacaccacttagttccaaaaatgatgagagatagcttataaacaacaaccatatatgtaacaaggtgaataaatgcaaataggaaatactagatctaaagggagtatgaaggaggaaggtatctgtacaagaaaactgaggagatgcagagactgcaagtaaccttttaatttggtcataagctttctaaaatgaaaagctatacacttcttattgactggaattatttggaaatatttgctggtttttcaggaagatgaaattatttcctacccctactacactgttacatatagaacccacttcatttaggtagaaaaatccatttatgacaaaaacagtcgtcttcattttgtgggaaggacacagaccttcaaagatttatatgcagcacccatagtaaaaacaaaaaacaagaactaccagaaattatactgatattgtgactaaagacctaaaatagcataagggaaagagactacctaacattgtgatttagcgatatcagatacagggaaatgtctataatataataacaacgacagtgaaagtcagattaaattttattggctcaggtatgtaaacacaaatgaccacatttctaaacctgttaagagccttttactgaggacactgactaagatagctttgcttccctttcccaaatgtgagataaagcaaattttgatacacaattaccgttagtgccactccctcccttaataaaaggatccatctgaaaacagagcaggaacataactcaaagggactcctaagtgggaggaaacataaaacacgaagtactcactgcagctgcggtacaatcccagaactctccgaagctggcgtggcaggagtgatgggggtcatgggagtcatgggggagggatacagtggagtggtgcccggcaagggtgcagttgtgagagtctgtgagtggaagagctgtggtgcctggcctgaggttccctgtgttgcctgctgggacgttgactgctgaacggctgcagctgccactgcctgttgctgctgctgctgctgctgctgctgctgctgctgctgctgctgctgctgttgctgttgctgctgctgctgctgctgctgctgctgttgttgttgctgctgctgcctttgttgctcttccaaaatagacagactattggtgttctgaataggctgtggggtcagtccagtgccataaggcatcattggactaaagatagggattccgggagtcatggcaccctgtggaaagcaaggagaaaaacaggttaggctggctgctgctaagtgtttgtggaactttcttggtggaacagcaggtcaggtgtgcaaagacagatgccttcggagaataatggggttattaaacattaattacggaagaaccagctattcttatacacattgctttcttctttaataccacacagtggataaacatgaagaaaaatggataaactgaacttcggaaaaattaaaaacttctgttctttgaaagacaccattgagaaaattaaaaggcaggccagactgggaaaaaaatacctataatacatacatctgagaaaggactggtaaacagaataataaagagctctgacaactccataaaagaagatcaacaaataaaataataaaaaagggcaaaagatgtgaaggacatattacaaatgaagatacaggcatacctcggagatactacaggttaggttccagaccatctcaataaagcaagcggcatgaattttttggtttcccagtgcctacaaaagttatgttagcactaaagtctattaagtgtgcaatagcattatgtctaataatatgtatataacttaatttaaaaatgctttattgctaaaaatgctaacaatcatgtgagcctgcagcaaatcataatctttttgctgacagaggatcttgcctcgatgttgatggctgctgactgatcagggtggtagctgtggcaatttcttaaaataagactgacgaagtttgccacactgactgactcttcctttcactgaagatgtctctgtagcatatgatactatttgacagcattttacccacactagaacttatttcaaaattggagtcaatcctctcaaaccctgctgctgctttatcaactaagtttatgtaatattctaaagtcatcagttcttcaccaggagtcaattctatctcaagaaaccactttctttgcttactcacaagaagcaactcctcatctgttcaggttttatcaaaaaattgcagcaattcagtcacatcttcaggttcacttctaattctagttcacttgctatttccactacacctgcagtaacttccagcactgaagtctagaacctctcaaagtcatccacgagggttggaatcaacctcttccaaactcttattcatgttgatatttcaccctcctcccatgaatcatgaacattcttaatggcatctagaatggtgaatctttttcagaaggttttcaattcactttgcccagattcatcagaggaatcactatctatggcagctacagcatatgtccctccctgcttcctttctttgagacagggtctccattgtagcctttaacttctggactcaagtgaccctcccgcctcagcctcccaagtagctgggactacaggcacatgccaccatgaccagctaattaaaaaaaattttttttttgtagcaacagggacttgttttgttacccaggttggtcttgagctcctagctttgagtgatccttccaccttggcctcccaaagtactgagattacaagcatgagccaccatgccctgctgtatttcttaaatagtaagaattgaaagttgaaattactccttgatccatgggctgaagaatggatatattatttaagcaggcatgaaaacaatattaatctccttgttcttctccatcagagcttgtggacaactagttacactgtcagtgagtaatattttgaaattaaactttttttctgagcagatctcaaagagcttaaaatatccagtaaatcatgctgtaaacagacgtgctctcatcaggttttgttgttctgtttactgaggacaggcagagtagatttagcgtaattcttaaggctctatggttttagagcagaacatgagcattggcttcaatttaaactcaccagctctattagcccctaactagtcagccagtcctctgaagctttgaggctaggcactgatttctcctctctagctataaaagtcctagatagcatcttcttccagtagaaggctgtttcatctacattaaaaatctattatttagtatagtcaccttcatcaattatctcagctagatcttccagataacttgctgcttcatgttgcatttttatgttgtggagaaggcctctctccttaaagctctgaataaacctctgctagtttcaaaactttcttctacagcttcctctccgctctcagcctttacagaattgaagagagttaaggccttgctctgtattacactttggcttaaggggatgtgtgggtggtatgatcttctatccagaccattcaaactttctccatataagcaataaggctgttttgctttcttatcacttgtgggtttactggagtagcacttctaatttcctttaagaacttttcccttgcattcacaacttggctaactatttggtgcaagaggcctagcttttagcctgtctcagctttcaacatgccttcttcactaagtataatcatttatagcttttggtttcaaatgagagatgtgcagctcttcccttcatctgaacacttaattaaaagtcactgtaaggttattaattagcctaatttccatattgttgtgtctcaaggaatagggaagaccaagcagagggagagagatgggggaatggttggtcacgctgcagacatttatcaattaagttcctgtattatacaggtgcagtttatggcattcaataataattacaatagtaacatcaaagatcactgatcacaataacagataataatgaaaaggtttgactaggcacagtggctcatgcctgtaatcccaacactttgggaggccaaggcggatggatcacttgcagccagtagtttgacaccagcatggtgaaactccgtctccactaaaaatacaaaatttagctgggtgtggtggcgcatgcctgtaatcccagctacttgggaggctgaggcaggagaatcgcttgaacacgggagatggaggttgcagtgagccaagactgcaccactgcactccagcctgggcaacagagtgactgaaaaaaaaaattaaaaaaaaaatacaaaaaaaaagaaaaaaaaaagtttgataacaataacggataataatgaaaaagtttgaaatcctgcaaaaattaccaaaatctaaccccaagacatgaagtgagtacacacttttggaaaaataatgccaacagacttgctgggtacaggtttaccacaaccttcaatttgtcaaacatgcagtaaagtgaagtgcagtaaagtgaagtgggcctgtgtatgagtggctgacaagcacttgccaaggtgctcagaaacattagtaatcaggcaaataaaaatcaaaaccacaataagatactactaagcaatcactagagtgaaagtaaaaagactgacagcagaaagtgttggtgaggatgtggagcaacttaaatctcttatgctgcaaaacaatacagccacttcaaaaaacagtttggcagtttcttataaagttatacatataccaatataggacctagcaatcctactcctaagtatttacccatgagaagtaaaaacagtgcattcaaagtctacacatatgtttacagtgcttttattcgcaatagctccaaactggaaagaccccaaatgtgagcaactggagaatggatgaactgtggaacatccaaacaatggagtgatacttagctatacaatggattaactactgatatacaaacagtatactgggctaagaagtcagacatacacaaaaaagcatacactctgattccatctatatgaaattctagaatagacaaaactaatcttcagcattgaaaagcagatgcagtagttacctggggccagcagagtgactataaaggggaagaagggactttttaaggtaactgaaatgttctgtaatttatacattatatataattatcaaaacagacacttaaaatgagtttttttgtatgtatatttcaacaaaagttattgatttttttttttttttttttttttttttgagacagagtctcgctctgtctcccaggctggagtgcagtggcacgacctctgctcactgcaacctccacctcccgggttcaagcaattctccttgcctcagcctcccgagtagctgggattacaggcacccgccacaacacctggctaatttttgtatattttgtagagatgaggtttcaccacgttggccaggctggtctcgaactcctgacctcaggtgatccgcccaccttggcctcccaaagtgctgggattacaggcgtgagccactgcacccaggctgaaaaatttttaaagtagatgggtggttgagagcttgaaatgtaaaaggggaaaaataaaactagaaaataatttggtgagggtgattttcaaaatcaaagaccctatatagtcatttggaacattctcataagtgtttatcaaaagattaggtgtttcataaatatataacttagcttccagacttcccaaataaacaccattgtgcctattcaaagcctaatagaacttctcaacaaaataaggcttaaaaaacatattaaaccattttcaaaaacagatcattaaatgcccttccttgccttttgataccatctcttgcagttcagatttccgccctccctattctctccctcctgctatattacctgaggggaggccaagccctgagcgtaaggtggcaggctgttgttctgatccatgatgttcactttcttcttggcaaaccagaaacccttgcgctggaactcgtctcactattcaattttttcctagagcatctccagcacactcttctcagcaacttcctcaattccttgggttatcttcacacgccaagaaacagtgatgctgctttggaaaaaagtctaaagtttaatttaaggatccaggtaacctgtacagtcctataagccagttctatggctatacaaaacacaaacatgaaaaccaatgaagctattttggaatacatttgtttttaccttataatcctaaagttttattccttccatgtttccggcgattgcatgtaaaatcgccaacaaaacaaaaatcattttgttacatgtttaaataatcggaaaatgctcaaaatcgagctgtcataaccagcattaaaaacttttgaggaaaaacacctagagaaaaataattcctaagcaaaatgtaatatcagagcagaatattcactaagcactgtatacacagcactgttaggcaaagtttagatctttaaatattccaattttacatcctctacaatgtcttgggcaaaaaattaagtaaatatcaaattcaatccaatatacttcagagtgatcatttatcaagctcctactgtaatgaaactgtaaaaaaaaaaagccgcacaaagataaagccctgaatttttataaatgtaataaccttacctctttagaacacattaatgcaaactgtgcctgttatctgacttttcttaaatcatcatcgctttactcactacacatctgaaatgagtttataacaacatattctcacatagaacttagaggtctcaaagttacaaattatatgtccaaagatccttcaggcatatgcacttcaagcatgtgctggtacagaacagacactcagatatttgctgaatgtatgaaagactctgacgatcactttgaaagggcaaatgcccccaaagactatctatcctacatactcatcactgaaaaacagaccaaaaaagaaagcaagctctgcttctggaaataaatatatcagagatattttttaaaatatactttttttttgacagttatcctataataacaataacagaagtcctgcagatgaggatataaagataggaggatatagtccttggcatcaaagtgttcaatatgaagggtatgcaaataactactgtaaaacatagtattataacagcaggtatggtctaagctaagttccttgaatgcagaaaccagcctacatgtctttgtgatctctgcatctagcactatgcctggaatacagtatgtgatcatgaatgagcccatatacacccctggaagagaagacaatatagactaacagccaatcactgtgaagagagcgcagtgttttcacaaagcagggaccatctaacttgggtctcacaaggtgagtaggaatttacacatcagggcttcagacaaaagagaaatcaagcagaaagagacagattgaaaaagcatgcagtatgcaggcgacaagcttagtatgactgtatagaaggtcactgcagcagatgagacagcacatattggtgggctcatactatcaggagttttcaatgttattgcataggcaataataacagttatggaattttggaagtgcagtatgaacagatctaatttggcaagactagatgaatttgagaggagtaaaactggaggacggaagtttcgtttcaggaatctaaggttgaggcaagagataatgacggcaggatttaaagccattataagtatgattagagatttatccaggaccttcggtggcttcaggccactttttgcaagtaagtctacagaagaaaccgcacagtgattactgcactaatttatcctcagaaaagagttgtttgctgggtatcttcatctcctggaaattgaaacatcaaatccgatattttttggaggcaatcaaattaattctgcatagccttctagtgtctgtataactaaatgaagcacagtcttttcacagaaaagtctacctagagatttggaaaaccatgatggcctgaaccgagagacgggagaccctgcaaataaagtggtgtgtattatatcttaagcgctaccgtgcccgctgtctcaggcttctgacaaaatatttaagtctcaatgttggcagcaaaacaggcgggcacagatctgggtgaatctgcttctaacatggagaagaagcggatggcaggacagggcagggtaaacttagggtcttcgatgcaagggactgtcctgtcccgcctgccgccgcccagccagccagtagtaccctgagccccacaatcgtacgatgggaagctgcctgcgaaacacagcagagtagggcaccaggcgggagtggcggccgagtggccgttacaggccggaacggcggcagcacgaaagggaggaacgtcccccgaggggcctgcacgcgcgccaattcctagtctcttccccaccattgcccccaggcctcagtgcagtggtggccttcgcccgaaccgtcagaaaagagtacaatctgttacctgggtcactgcaaagatcactatgggccagcggaagcgaagttaaacagccggcggcccaggcgcccgccacagcgaacctgcccgacctcactgaacccctggcgcgcgttgataatgtcacttccgccagttctgccctcggcttcagcgagttgctcccactagggccgaggccatgagaagtgtgagcataggtcacttcctgtgtttccataggtaaggaggggcgaagctcttgaggagttccggggcggggccgccgtgccacagccatctctaattggcccttgctggacgtaggaaagatcgatttttaaatggcgtgtgtgtgtatatgtgtgagtgtgttttgttgttgttgttgttgttgtttaaagcaactagcggcgttaccttcgacaagttacctgacctctcccccgcattttttttctgtaaaattgaataatgataacagtgcttacccttgggctgtcgggagattgacagagattgacagaatcagtgcctgagcagtgcttggcactcagtaagcgcgtcctccttacctgtcagcaagaacgctagctgatcttcaagcgtgtagaatgacaaggaacactaagcaaaacaaacagcttgtgtttacacatgcatttatattcagttctgccactcccagttcatgcactgttgtcacatggctctttccgcagttgtttcttagtgggacttcagcacgccttgattttcccttctgtagttcattgtggcgtaatcatatgttatactgcttgttttctttgtactttttattatcagtgaggttgtgagctctttaaggataggaaatgttatatacattttttattagccaggacaattaacgttcccaccgttattcgagttgccgttgcgccatagttctgacaatttttttgtatggtcagacttaaatttttgtccattggggtgaattccaatgttttcttcgagggggaaaaaaacaaaaaacaaacaaaaaaaaccctttacatccctgtcagcgctttttggaatgggcgggattcaactaccaaagggacaagccgccgtgcagccctccaggagcaacgactagcgtgagatagagaggccgggagcgaacttcaggagaagccggaagtggcgtaacgtccggtcaaggcagccatctcgccgtgagacagcaagtgtcggatccgcaggcgcagccgtgcgatgttgtcctctacagccatgtattcggctgctggcagagacttggggatggaaccgcacagagccgcgggccctttgcagctgcgattttcgccctacgttttcaacggagggtaaaaaccccagagagctgcggctttcactttcgcccttcccccatctgctgaagcctatttaggagtcaccgccgtgatggcgctgccccgggctcctgcaggcctcagaaccctgagctgagggggtccgcacaaggccggtctccctgccgtcctctcatgcgctgtgtttccctcttcaggctcgctttgctcaagtttacttggtgattgcgatacagccttggtttttagggtttcccattacagtcatgtcatttgagtttttatgtggaccgccactccgtgctccttgctgctgtaagacagtaaagtagaaattgaaacatagcctctgctctgtggaagaccattaaaactggacctcatgtacacgtttcttatgccagccggcgagggtagagggttagcgtctgaaacttaaaagttagggttgtttggtctgtgttgttagatgcatagctgggttggtagccgagatgtctaattgtagccgcctgatttctgttatttctaattgtagcagtttaatcattttgttttatttcaaatagaaggtgggattggctgagcaaacttagtttcatagataagtgcttttttttttaacgtttagcttaagttcaggaaaacaaaatactcagaagatggaccttttagtatgtgtgttcttgtatgttatgttcaagttttggtttttattttaattaccagctttatcttgagtagtataattttccgtggtggcacgccagagatttagggttatagaaagatgctctgtttaagactcttgacagggaagagctgtaaattgaaacagtggttatagttaccaatcaagccttgtacattaaaatatacacacgcaatttgaacgaaccgatggttcttaaaacagaaaatattggctgggcagtgtggctcgcacctgtaatcccaggactttgggaagccaaggcaggaggatcatcgcttgaggccaggagttgaagaccagcctgcgcagcatagcaagaccccatctctacaaaaataaattttaaaaacaaagcaaaaatgttaattggttcctcataaatttgaaatataaatgcacattttgggagtgtgttagaaagataacgaaagtctgattttagccttggttctgccactaaaggacactttgggtacttctgaacttcttgaacctaaatttccttatcttccttagtagcttcatagtttttggtgagaatcaagagagatgcattttgtaaattgcaagctgtcatcttatttaatcctcatgaaaagtgaatgttagatgatattagcatcctagggttatattagacgttaaactgtcagggtcagagagctggtgtgaagttgagccaggacttaattcatagctatttcaccactgagtttatggatgcttttccattatacaccttaacacttcctgtgatgactaattaagttgtatattgtagggagggttattggacccgtttcgtaaggctattctctataaataagaattttcagtgttcagtatgccctactcgttactcactttttaatcccttgtaatccagtttaagccattactgccctaaaaattacttagatctttctgattactttttctcagtcattgttctttttctttagtgattactgcagctggctctcaggcagccttcgcttccgcaaaatgaggcctcattctcttttcctactctgtctttaaatgtagttaagtcattagccgccttgtttatcgctcagcactctttcatgtctcattgctgggaggattactcccaaatctggttttccagttctgcctctcatgagtccctcgattcggcttcttcagtaaaacatttttaactggtttttctgctctcagggcaactcaagacagctagcaaaacaaaaagcaagctaattattccccttcatctcctcttctcctttcttcttattttttgagacagagtctcactctgtcacccaggccggagtgcagcggtgcgatctcagctcactgcaacctccaactcctgggttcacgcatttctgcctcagcctcccgagtagctgggattacaggtgcctgccaccacgcctggctaatttttgtatttttagtagagatgggtttcaccatgttggccaggctggtctcgaactcctgatctcaggcaattgaccccccccccccctcagcctcccaaagtgttgggattacaggtgtgagccaccgtgcccggcctcctctcctttaaaatacttataattatgccatcattctgctcatctaagttctaaatcttggatgtcataattggttttcccagttcctaaaacatttgcgtagatataaaaatttgtctattttgtgtgtttgtgatgattttggatttactgttcaccctgctaccttactattgcattagtagtattagaacagtgtttctgtcccatttcacatactatgttgttgtcagagcagtcttcctaaaaccccactttgtaaatggaacttttctctctcttgcattccttttttaaagaccaggtctcactctaatgcccaggcacgatcatagctcactgcagccttgaacacctgggctcaagcagtcctcccacctcagcctcttgagtagttacaactacagatcattcttgctcagaataccttcatgatttcttgctaaaattccaaaatctttagcttggcatttgggattttctacagtaggaaccctgtccatcacataaaccttaacgtcactacatgtgcttatgcaaaaagggctgcctgaatgagttgcttgaatgtatgtactatttgaataattacctgtttgccattgcttgctgtttatattacctggaatgccatccttttcttcttgagagctttagcacaaatccctcctcagtaaaaatagtggcttaagtttcctgagtgcttacgtctgtgaggcaccatgcctttaatttccactattgcattgaagcagtggttatagttatcagtcaagccttgtacattaaaatatacacacccaaatatatatacacaccttgtgacacaggtactgttatcatcaacttgcatttggaggatttgtccaagatcacatacctagtaagtagcaagagtgggtctctgtctcatgtaattccagagcccaggtgcttagtcatactccagtgccatagcacttatagctaacacttactagaggaccagttacatgtcagggactgctataagggcttacatatttgatcctttgaacaccctaatgaggtagcaactgcagtgatctctgttgtatatatgatgaaattgacgctttgagaagtaacttacccacagtctcatatctgcgaaacgggaaagccagaattagaacccaggcggtctgcttttggaattctactgtaagtctctttgataagctgtcaaattgtacagccacagagggaaaaatttactgtttgtccatctatttgtcattatataagggattgggtataaagaaataagcattatataggcgttatataaggacttggatataaagaaatgaagcaagaaaaaaaaatctcatcttctctaaactcatagagcttgcgttgtagtaccactgtctatacctgatcctcaagggcacagatggggtatttagttgttctgtattagtagtaccttgcgcgagtaagtatttaatgtgttggtgatgataattcattggcttttctgttaactcctgccaaggagactttgccctgatttaggcttattaataatttttttttcccagacaactcgtagccaggcgttcattctcttcccgctcatctttcctcttcccatttgaatcatgtttttgttgacatctagagtattttatcccattatgtactatggagcattcttctatttgtagggataggattaccaccctggagaattaatttttttcttttttcctcagtactatactggcaattgctggagaagattttgcaattgttgcttctgatactcgattgagtgaagggttttcaattcatacgcgggatagccccaaatgttacaaattgtaagtaaatatttctaaagacatttcacaatgcctttgtaatgatttaatgttgtgagagtttctacttctaaatgatttgtttcatgagtttttaagttgctgttgggagcatttttattagaaaaccattttctaagttaatgtttcctaataatttaatgtgcagtcttaataatatttgctgtattcagggtaccaaaagtgctttcggtaacctaaatgtgttcaccccagcattttaccatgaaaaatttcctgctgtgtcttaacatggtggaaggccagagaaagaaagaagagcaagcgaacccactgctgtgataatgtccattcatgaaagctgagccctaggacctaaacacctggtcccaactcccagtaccatcacaatggcaattaaatttcaacatgagttttgaagggaatattcaaaccacagcaccattaatccattaaatgatattttttttaaatctgcctccccacactttttttttttacctgaaacattcgttttagaaatatcctaagcaattatgtccacagctcagttttaataggctagctatgtttttcctaaaacatgaaaataaagccaaaacttaaaaaaacaaaaagcctgcataaatactgaatacatactgcagattggcagtggtctgtatttaccagttttggaaatgcttataaatggtcatgaattcctgggttaattaaacttgaattgtaataggaatgggacttacgaggtttaggtcctttggatggaccctccttgtattgtaggaagtaggtacagaagaaaagatacgttgtctttcctgctcctagggatggcccacatcttaaaaagcaatgaagtttgttttcgtcttcccagttctgtttctctccacttgcatcttttgataccccctttctgctttctgtttatggtgctcttgtgttacctttttttctcctcaaggacgacacttgtacaacttgaaagtagtaaatattagaaataagattttaaaacaactttatggataccatccttgtactagcttttactcatcttttaaatattgctttagttacgtttgctggtgaagtgagcactttttttttttttttttttttgtgaaacacgtcagatatagagatagagaataagaacaatgcagcattaacgaatgcctgtatatatccctcatcccacgtcctgtggggctgacctagaactaagcttgcctcttccaaacctgtttcagactgtattctttgcatgaaaactcccattcctttgatgcacctggatatttgggaaaagcatcttgaagttctaagatttctgtctttccctgttggtattgtcaaccaatcttgtcagtaaaggcagtaaagccttataggggattggacgtcttcaccttagtgcagtgaggttgatggtaggcatagatcaggtgatgttagtgatgaccctagaggtgtcagctgctctcctagtaggacaggtatggtttgtgcgagtcattcgtaagtttccaagaggaattgtgtggcctctgcaaaatattgtttaggtttctttatagattcatatcaagatctaggaattaatttttgaaatacacggttgaatttgtatgtctataccaaattttaatcctctccatacagatggacatttaggttttgttttgttttggggtgctatttaaatgagtactcactggtgagtctagagcatccctttgcatacttggataagtatattaacaagatggatttctagcaatagaattggtgagagtggtgtgtatttaaatttttaataaataccaccaaattgcccatctaacaggttaatcagtttatactgtttccacaacctcaccagcatttagttagttaggcatttttagccagtataattggttgaaatagtctctttttgagatttggatttctgagtaacatagaggctcttatgtttatggtgacttaatgtctcttttttctgtgacttgtctgttcatagaagttacccatctttcctttatgttattgctttccttatttgtaagaatttttatagaattaaaattagactttggggttagatgctactaatatattttcttagggttttaaaaagctattcttaaatttccctgtagaattttatgtagtcaaatttatgaaatttttctgtgtggcccttggattgtgttgtttaaatctaccttcacgaggctgggtgcagtggttcacacctgtaatcccagcactttggaggccaaggcaggtggattacctgaggtcaggagtttgagaccagcctggccaacatggtgaaaccccatctctactaaaaatacaaaaatcagctgggtgtggtggcgggtgcctgtaatcccagatacttgggaggctgaggcaggggaattgcttgaacccaggaggcggaagttgcagtgagccaagattgcgccactgcattccagcctgggtgacaagagcgaaactccgtctcaaaaatcagtcaattaacctacctacgtatcttcctcagcccaagatagtaaaaaaaattcacccatgatttatttagtccattcatagtcgcatttttaaagtctttgatccacctgtaattcatctggaataaggggtaagatggaatacagacccctcctccccagaagggtgactgtttgtcccattaccatttagggaatagtgggaatcagaattttaaatttaaaattgccgaagatatgttttgctctactatctaaccagctcagttttctgaaatgtgctttttacagaacagacaaaacagtcattggatgcagcggttttcatggagactgtcttacgctgacaaagattattgaagcaagactaaaggtagatgcttttgtacatttctacactattttaaattaatagtaattcattaaattcttttaagcctacagcatgactgttggtcagatagctagagagtcactaggttagtagatgaattacaaatgtatgctagaaatgaaatgatatcattaatgcagggtcattaaagtagcataatgtgaaacagcagcacattccatttgttaaagtcttgtatcatatgaagggttctctacccttttagaaggagcctgggaggagttcttcttctgaagatactcttccctcaaaaacaaagcaaatcaatttctgtggcaggagagagcccaggaaagatttgacacaggagcttggtttgcatcaccatcagttgacaagcttttcctctttacagtgctgtgctcttagttggcaggatgcatgagtagaaatatgaaagaatgaataagctgggagcttggatgggaggcacaacatgcaccattaacgtctgtcacctgaccagcttcagttgatagccagctgccagaagtcaggggtgatcacattctgttttgcctattcatgaataacacttgagattatttacacttatgagtggttactggagtatatagtatatttatttaactgacacatgctttttgaatgtgtagaaaggatttcactcagtatttatcaattgttaatgcttttttagaaacttacattgaaagccatagtgacttacatttattggcatatttatatgataattcctaatgcttattttataaatgggagttagaagacaaaagtaaacatgatattgttaataaaacaaggaatggtgaattctacataatacacaccccttcctgaagtttttctctcatactttattaggtggtgaagtaaataaatgttggtgcttggtttcgaaatgaaatggaatgaaatttttttttttttttttgagacagagtttcactcttgttgcccagggtggagtgcaatggcatgatcttggctcactgcaacctctgcctcctgggttcaagtgattatcctgccacagcctcccgagtagctgagattacaggcacctgtcaccacccctgtctaatttttgtattttagtagagacggggtttcaccatgttggccaggctggtctcgaacccctgacttcaggtgatccacccatctcggcctcccaaagtgctgggattacaggccagcagtgagccactgtgcccggcctatgaataattttttatagtttttatcttggaaaggcattcctctataaaaaacttacctgttacttgtagttcatttctaatcatttttcagtgttttgactgtcattatttaattttacggtgctagttagatatctatctgtctatttatttagagacagcgtctcactttgttgcacaggctggagtacagtggcgccattgtagctcactgtagccttcatctcctgggctcaaacattctcccgcctcagttgagattacaggtgtgagccactatgcctggccattaagtttctcattagagatgtttgctatgtggttaacaaaaattggtgatcttgaattcattttatgtttataatttttgtgaagtttctctaccagtgggtagtgtagggctcgcaaaggtatagtaaagctaggatttgcagtcactgtattgtcatgctaagaccctgttttggatgcttgtgttctctactgtagatgttttaaggatcacgaccactgctgtgtattaaaatcatgcagagtaagggtgctgccctgtgtcttctgttctcacagagatctgctccacaaagagagggacttacatctaggtttgatcagggattgccgtaattttttctgtaaaggaccagatagtaaatatttacagctttatgggcctcatttgatctgcttctgtagtgaaaaagcagccacggacaatattcatagcaatagggagtaggctggatttggcccctgagccaaactacaggggtagtttgttgacccctggtctatatgcagagtgagggagagagatggatttaaacccatcttccttaggccacttcatgtgccctttcatacacattagctcttggattagcagtacctgagataagggtggtatggaaaatagagtctaaaccagagagctgagggcaaacttggcattccttcccttaaaattttatgttagtaatactgtgttggttgatcatgaaggaaataggcatgctttccccttccactgtggtatgcatttatttattcactttatactgttgattgttctagtctataatggcctctgcctctacatgcctgtgacttttatcaataattgcagatgtataagcattccaataataaggccatgactacgggggcaattgctgcaatgctgtctacaatcctgtattcaaggcgcttctttccatactatgtttacaacatcatcggtggacttgatgaagaaggtagaattccttctttctggaaaatggtgggggggaggagttattattccctagatgtgtgtatccatctagagttgaaaagaaccataaataccatctgacacaattctcatttcatttctgataatgaaagtgatgaagaaactgaagctaatgtatgacctccaaaggcacattgaagctctaatagtgaatgttgagcagccagttattttgctattttctcaggaacttgcatgagttagtagtaaataattaggcatttttatcttatagaaagaaatcggacctagaaagcttgacctaaatgtgattctgagtattgaaaatttttttattaacaaatacacttcaaaaaagttctttaacggttctagaagtcatttggggtaattaataataagcatctactccagtgttttcagaactttttgaaacacctctctgattttgtcagagtcagaccaggattccctgagaatattaagtcttgttacttaatattccatcccatttttgttccagagctgcattacgccacatgggcaccaatgttttccatccaaatgttccaatccatttgttctcatttgcaatccaaatgttctcatttggattggcttttggttgcatctaaaaatcaaatacaagtacagtgtcccaggacagatctttgtcacttagagtagtccattgacacagatggataagtagtccatctgtgtcatttagagtagtccattgagataagaagttacagaagtgtctagatgaggatatcattggagtaagcccatcttctgtgttccttctggctgaacctgtggctgaagttgccctaaaagtaggggcagaggaattcctgtaagggactgccccgaacctagttggggttccagaacactaaatctcagggtaatcagtcaaaagcatttagtgctgcagcagtcctctcagcagacagcaggaaaagatgtgtccaaggtgagggagttgatttgagtgttgaaggaatttggttcagggccagggatagtttctgtgtgtttagcaacaggggtaatttctcagtgtttcaagcaatagcctaaacaacattgtcagcgcctgggaatgttcaaggcaggccttggcttgggtcagagcctccaggggaatacatgcggctggccacatcacagaacatctcagttggacacagaaagaaagcaaggggactggggaccctaaatcctgtgagggaaaattctaagaggaaagggtcaagcttcatttcagcgccctgcctctcggttgttgactcctatcgctttctgttccatgagcgttttctttgcgtgcgctatctctgactcttaacatccgcccccatacacagccttggggaacattctgatcattttacctgccatggtttaggcgtagacaaattaggttgacacaatttctttttaaggctttcaaccttacttgaaaaccaagagaaaaagtaaagtgtagaaatagtaaaaatagaaatgaattacctttaacatgggtaattagagtctagctacaaattaatttgcctaacttagcaagctggatgcttctggtgtcttttttgacttacattatgcctggctttaatgtcagattaatagattcagattttagcaacattaaaaatagctgagctgccattgaatttcagcgggccagacagcatcctttgagtttttccgagagttagagagtctaatctgggaaagctgatacctactaagcagcagacctaagattcaggtttggcttttgtttcacttcagagccctgttctttgatttccatgtaacagtgttgctagttttggtgacaacctcaggtgtctctagaactgtctttctaagcttgtctgtctggttggcttttaagtgttctttaaactaatttttattttatagaggaatttgtgtgaataataaagcagtcctctatcttttttttccattgccctaagacagttttcagctcttttacctgtatttcctggtacttacctccattttccaaaactctgtatttgtactgcactcttttgagatatcttttggtgttttgttctggtagatgatggttcttagctcttttgtgtcctcttcctcattagcatcctcctttaacacattacacttttggtaacatagacctttaatgtttttattatgaccagatagatattgatctttgttgcgccaagtagcatgcattaatattttctttcttgtgtaactcgtttttatttttttcttaagttaactatctctaattggctcagatttctttaaactttttgtcagttccttgtacattctctgagtacaattcatctggttgtcagacctcacatactaggtggatcccttttccctttgctccaggatggaccactgccatcctgagattcccccacatcctgtgttctcctctttcttgatttatttccttattttagaggcttacctcctaaaagatttctgaaaaaaacaaaatgggacctttttgagactttgcttttaggatcttttctttaccctggtgttctgaaattgtatagtgatgttccttgcctagagtttcttatttgttttatcctctttctccaccttctttcctctcctcctcccctacccctctgcaccttctccacaaccacctggattatgacccggtactttatttttgactccccatgttatccatgtctgtcttttttgttctactttatgaagatttccttaattttagcttttcatcctttactgattgcttttatttctggtgtcattaatttccaagagcttgtacttattttttgtctttttaaaaaaaatcctgtttactttctttgcagttttctgtatttcatcagaatgctttttttttcatgttgtgtgttcatttttggcctctgtcttctatgttagaggcttccttcaaatctctgatttttttttttttttttttttttgctgtccattcacattgaagagtcttgtaccaaaatttgattatgaaagtccttgttgacatggcttgtcaactgacagccgttaactgggtgcttaagtaagcagcattttcttcagatgaagaatttctttaatcttttttcctgaggtgaggtgggactacaggaagagaagcccggttggcagctttttaggcctcggaggaggaagggggctgaaggtctgtgttttgtttacatcaactttccatttcatgtgttttgctcctaccctttgccactctagagcctggtcccctaagtccagagcctctgctaatgtctcaggagacttcctttactgtcttctgtgttggtggatgcagggacctggagagcagtgctccatattgaaaccttcaggacagcaaggtccacagctctttcccttggtgtcaaccgctgtctgcactaacctctctgtctttaatctcttagctgctctcatgccttttaaaaatttttctcccaaattaaaagtggctttagtttttctgtagtgaaaacaatcagtacatgtttatacatacactcatgtagttttatgtaagtaggactttggtatctgtttttctgtaactatacattatgtattatcaaggagatctaagctatatgcataatgatttttgtatttaattaacaaaaaatttttttgtcttctgtttttgctgctgtaatacatagcatcatttacctaaccagtcctctaaagggcattttggcttcctgttttcttaatgtaaacactatgatgaacatccttgtacatacatttttgtgtacttccccaattatgcttgtcttgctagaataaacttcgagtagttgaagtattgggtcagataaatttttttttgtattttgttgagtatactctttctgaaggatacgccagtaccctgagtacccgattttatataaccttcccagtattagaattaacacattttgaaacatctttttgcctattgaacagtttattattttcatttatatatattcttgggcatgttttcatatgtttattgactttataaatttcctctttggagactgattcatatattaactgttgcccatttccttatttgcaggttagttttcttcttattgattttcaagaactacattcgactgtgtcaaatgtctgtgatattatagatactcccaagagtgttatttgtctcttttgggtggtgccttttgctacacagaaattgctgtgtttcatacagtctaatctgtcaatcatttctttatgacattcagtttcttgccttgttagaaaaacttctcccatccaaagcttagctgtatttcttttaagacttgtctgattttattttttacattgaaatgattgtgctttttggattttactttgatgaggaaaagcactttgtaatcaagattcatgccattctacatttatttttgtttttatttattgatttttgctgttttatactgattttactagtgtctctcttgcttcttctagggggtctttaaagctgtgttcttggacatagcccaccctttctttggtttatttttttaaatttgttgtgtgtggttttctgagattggttccatccttgggtaaagcttttgggcctcagtttacttgtggcctgtcatcctcatgagagatacaatcatttttctgcctttacaccttacatctctttctttttttgtatattgaggttagtggattgcctgctgtgatctcatgtcttgtcccaagcttgcttccagcaaaaatacttcccagtttcttaggtgacctcagatggtgccttctccaccagagaattcagtttacacaatcctttttctttttttgagaccaagtctcgctctgttgcccaggctggagtgcagtggcatgatctcggctcaccacaacctccgcctcctgggttcaagcgattctcctgcctcagcctcccaagtagttgggaatagaggcacgtgccaccatgctcagctaatttttgtatttttagtagagatggggtttcactgtgttggccaggctgatctcgaactcctgacctcgtgatcggcccacctcagcctcccagagtgctgggattacaggcgtgagccaccgcgcctggccaagtttacacagttctatagtagaaaacatacaaagctaacagtggcagttgtacatggttagtaaggagattgtccctatatcacatctcccagggtactgagttctggtatataatgtgttttctaaatcagttatgtttttaaaaaatcataccttgtaaatgactcgtgatttctcatacccagaacacggttgtttttaacaggcctttttaacgattgtagaatcacctgtgttctttgtaacaaactcaaataagatagaagcacatgaattaattcccttcttttcttgcctctaattcagagctcaaagatgaccagccacagttacttatctttccagacttttttgtgcttgtacaaatagttttcttattcttttaaacaaaagcagtatcgtattttacaggttacagaattctcttcgttttactgtgtcttgcggatgtgtcccttggacctgtctatatacataagtcgtgctttccttcaagttctcctcttcgttagcttaggagagccaagaaataaagactttcttacaaatgactgtttgagtttggctgatgtgtcctacagaaacctcaccatctctctctctgttctccctactctcttacgggtccttacctactaccatggcttggattatttttgtgtattctcatggcttccaactgttttacatctgcagtggttaattctcttgtcatctttacctgaagatcataaaaatgcctttctccctcttacccaccctttctgtgttactcaatattgtattttaactcccaagcctacagtttacccttgaacaacacaccaacacggggattggggctgtctgctgggtggcacctgtgcaatggtgactgggttctggctgtcacatgtgcaacagtgtgtgtgctgcagctgtcaccagtgcaacagtggctgtgttccaactgttccctgaagttttagccaaggtgatagtccgttttgtgtcacgttttgacctgatttatttttgcgatgatttgggattgtgattggataccatccttatgaatactgttttcttctttaaggaaagggggctgtatacagctttgatccagtagggtcttaccagagagactccttcaaggctggaggctcagcaagtgccatgctacagcccctgcttgacaaccaggtaatgatactgtgtccaggtaatgatactatgtccaacttgtcatggtgttcagttgaagtgccttcctccaagttctcctcttcattagcttaggagagccaagatataaagactttcttataaattactgtttgagtttggcagacgtgtcctacagaaacctcatggtctctctctgtgttctgcctactctcttgtgggtccttacctactcccatggttttgattgttttcctgtattctcatggcttccaactcttttatgtctgtagtggctaattctcttgctgtctttacctgaagatcataaaaatgcctttttccctcttaccccccctttctgtgttacccaatactgtacttgaactcccaagcatacagttgagccttgaacaacacggggattggggcgccagttccccgagcactggaaaatccacatataactttcgactccaagaaaacttacaaataagcctactgttgactggaagccttgccaataatgtaaactgtggattatcacgtattttacatatgtattatgtgctgtattcttatgataaataaactacaggaaagagaatgttattaagaaaattataggaagagaaaatacatttacaatactgtatttgttgatactgtaagtttacatcatctgtttacaaggagaatcatctgtctggagtggtggacaaccacagctgcagacctcaatctacagtacatatcaagcaattcagctttttcttgtgatgtcataactttccctgcttcttggggagcagttccagcatcactaatagtgctttgtttgggccacttgttatttaaggtttataataatcgcactaaacacaatgaaaaacaaaggagaacattgagagatcactttaactttttataatcagtttatgtgtattttatggtagtaaatgataaaatagctagtatctacatacagtttatacatttgtggcatacctttctcttaatttttaaggtatttttaggctacttggctcatctgagtttttcaaagtgttgcgagtctccaaaaacttctcagtgtgtttactgaaaatttatgtgtcagtgggcctgagtggttgaaaacggtgttattcaaaggccgcctgtatttctaattcgtccctctttgtgattactgctggctaaattcagacctacattattagattattggatttatttcctaacatcctttctgcctacaagtttacttccctaattcctcctgctcagttttctgaaggatgtcatatatagctactcctctgcttattgcttattgacctcatctcctgtcaccccactacacccagaccctaactctgcttttctcagaaaagatgtgcttttcctaactccgtcccacatcttcagtctggaatgttctgtgctcttcagtgtagccttcagcgctcacctacttaaaagtcctttctgctgaagcctgtcttcttctaggagacttagtggacatctgttggggctctcctggctcttattttcttcttagttatagcaattctctgatcactttgcttgcatacgtccacctctccgggtcatgtgcttctcaagagtgggagctttgccagggaatcgttgtcagatttctgatgtgtgtaattcatccaggtctggaagggtctttattcagtctgaaggacattttaattttgtatagtattttcatcacaaatcctcgtacacatgagggtattggaagaaacttgaacctttcctttgtgctcactgtcacatgacatctcacccaagtttcatgtcccaccaggttggttttaagaacatgcagaatgtggagcatgttccgctgtccttggacagagccatgcggctggtgaaagatgtcttcatttctgcggctgagagagatgtgtacactggggacgcactccggatctgcatagtgaccaaagagggcatcagggaggaaactgtttccttaaggaaggactgatctgtgtgctcttatcaccaatcagttcagacctggttgattttgtactttggaactgtaccttggatggttttgtttattaaaagagaaacctgaagtactcattttgctataacttgtcttctctaagcaggacagatataggaagtagaatttcttttaattttcttcatttttcccacccttttctatttttctgagatttttttttttttttttttttttttttgcattttaagtaatgaaaacaggtcatgttaattttcccttacactaatgaggtaggaatttctctgtaaaagttgaccttttgagcaaacttatcttatgaagagggctctggtgtttacgcagccagcttgcctgaagggacctttaaaccatccagaagggagagtatttactagggttttattaagactctaatggttataaatgaaatatcttaagatttttcacttctgggactgttaagccatctggaatagctattttggagaaaaatcttcaaccaaaataaaactgtaaaaaaaaaaaataggcctttatacaagctgtagccagaaatctgggataatttttacaagcactttagtaatgttataattgagacctaagttttgatagagccaaaattttttagatctattaaatacattttaactccattataatatttgagtaattttcttgttattgaacaagtcaaattatatgtaacatgggagttattgtatgctttgtaccagaacaacctgtggtataaatggaattttactaagttagtggttaatcttagataccacttttgtttattttgccttttataaataattcaaattatcgaaagctgctagtagatacacattgtaaacatttattgcacaaacatcaatactgtcactcactatcccaggcattggggacacagtggtaacacctggttcatctcttaacagtgtctgtatgaggattctccaaagactcagaaccaataggatatgtttgtatatagagagagatgagaaagggtttattaaagaaattggctcactcagttattgagactgagaattcccatgcctggctgtctgcaagctggggagccagagaaactggcagcatggctcagtccaagtctgaaggcctcacaaccagggaagctgatggtataacccttgaagtcctgaaaataaggagttgggtgtgaggggttgctaatcaagtccctggctcgaggagaaagacagtgaattatttgcctttgccttttggttctatctgggctccattcagttggatggtgcctgctcacacaggctgatctgcactcagtccacaaactcctaggccagtctccggaaacatcctcacagacaaacccagaagtaatgctttacctgctgtcttgatatcctttaatccagtcaagttgacacctaaaattaactatcccaatgtcccaactaaaaactgtagagtatcccaatttcaaatctacattttttcttctttatatacactaggtatattcttattctaaaggatttcccattttggaattttctgtttatataaagttgtgtatctaggattttctataaggttctcacctcccaaggtgtatagggaagttctacaaattgagtaatgattgatggcacataattagtgttccatgatgtttttttacaaccttcagctaacattgttttaatccagtattgctgtagactttgaacatggtcttagttttggagtgaacacgacttagtccagaatgtgtttggcatatggctcctagagctaacctggctactagttatttgggtagttttatagatcattcaggcacattccttgtgtgaaaagaaaacctttgataaacattagaagtatgattcattcttaagagttaggcttgaagattccagtgagaagctgctgatgtagagactttctcttcattactgcctgcaaggggattggaagtatctggtaatattacaagtgattgatggaaaactgcttgagaggttggccatgactccatttatacacacagaatgcacgtagatgtttggatttgtcttaattatccgacagatggcataaatactttccggcagtctgctcagtggggctgtgctgacttgggaggttagaaacaaactgagcccgtgactgccaggtaccactcgtgtctccatatttcccatgcagcaatagctcctgctgtagtcacagtgactttgcaagcctacccaaggggaatgtagacaatttagtaggaaaataatatttcttaccaaaatgtcttggccaagcacagtggcttacgcctgtaatcctaatactttaggaggctgaggtggggaaatcacatgagcccaggaatttgagaccagcctgtgcagcatggccaaaccccctctctacaaaaaatgagccagggatggtggcacatgcctgtagtcgtagttactcaagaggctgaactggaagaatcacttgagcccaggaggtcaaggctgcagtgagctgtggttgtgccactgcactccagcctgggtgatagagcaagaccctgtctcaaaaaaaaaaaaaaaaaaggcataattattaccctgataggtttcctttttctgcctttctgtacctgttacctgggtgagcacttaatggcccaaaagtgtattaacatgctttctgattctaggtctctcattccttgtatttgtgaatttcaaactgtaactggaagattccctgtatcagaattacgtagagcacttgttcaaaatgaactcctaggttcaatagacctattgtcccagtctctgagctagaaatcccaggtgattcttatgcatacacaatttgagaacttctttaactcctcatcagacaggttcaatcagagaagccctaggagacataaaaagatttattacagagttcggcctcacataagaagagctgattagatgatctatataagcctgtttctgtttggtgctaggagcctaaaacccatagcacaggctgtcaaaggggcgatggtgcaaaaggaggagggtcaacagactggattgtgacctgggaccatgggggacacctgtggcagtcccactaccttagaactttcacttagtgatcaggtactggcctcctttttcatggctagacatgcacctggcccaagagcttgggagaagttgcagaagggcctgacaggagcttaaggagctgggaccccatatgcagcccatgccgccaggtgagtcagcaggtaaagaacacgcgtgagcggtgacagcccatcatgctctgctcagcagcacaagagcagatggctgctgcctcactgcaccttctgcatcttaggctcctttctctgagtgcaaacccaccagagctgttcagtacccatcggtggtcttcattactgcacgaagtccaagtctttctccgctttgtgaaattaattcaaacttaaagctgttggaacttcaaattattctgagccttgaaagacatgtggctatgcagagcctgagttatgcggcatgcaggcgcaacttctgccttttcccctgtaaacaagacaaaaaggcaccagacataagacccctcaaatcactactcctccgcacagagtaataaagtaatcttggaatgagcagcaatctataaccaatcaaattgctgtggcgaatgcactggtcttgtatggaaaatgtgatcctgctaaaatttctaagtgaaaccttaacttctccactttgaaacattaaccttactggtttagagtcagtgtttccaggtggccattctcaagctctgcactcgaattaaccctctacttaatcatattttctaaatctcattatttaaggttgatagttttcagatccctccacgccatcctcgcctcccccacccaactccctacctcttcaacatacttctttaactagctgggctgctttgttaagtgggtgtgatattctcattcttcagtgattcagctaacattgtctgactttgtgtactgtccccttgaactttataaatcatactcttaaagtccagatcaagttttattttctctattgagattttcccaacttttctagattttatgaatttcttctgagcgtctattaacttgatacttgtagtttatattaaatatgaatgcaattgtttgctgttatttcttaaatattgcccctcccatttacttttcttatatatccattatacgaagtctgaacacataggaggcacctaaaacctataaagagacatggaacttgtttaaaggacccaggagtgatccgtttgttagtgttgattgaaaatccatcctgctgcctacttctggttgtgagagaaacattaaatctgtgagcagtgcaaacttctttccatccctcctctggagttcctagcagcaggcctgggtctaaacgtgggaaggagcttcaaatcttttatttcaagttgtcacttctatggaggggtagtagctctgtccatgggcaatttggaatgttggaggagcctgaaggcaagtggagttaggaatacaagtgtctcacccttgagttccgctcagcagaatgaagagtatgggtgcactgcttcacccacaggattgcgctgatttatctgttgacatactgtgctagttttctccctagaccgggaggaccgatagtgtatgtgggtgcatttcaaggcagccactttgtatggccactatgtccaatgaaaggagaggcctgtggccccactcttgtcatgagcaccctcccagccaggctcggtgtcttgtgcctcctccgccagacagagcttcatgtgcatctgctccactcttgaatgagtttagctgccaatttgctctcccttgtctgaatggctcctggagcttgtgaatcatctttgaaaaatatttctataatgggaaaatattttaaaaacagcatggggcgtgagcagatgtccacagggctgattgttagaaagtataggtgatcgaaagtgtgatcctcccactttgtcctcaagctgaccaatggcctgacctcttctgcagtgagaagctgctggagagttggctgagggtcaggaaatcaagggaccttcattcttcaatgaaagccaggctccacatcaccctccaagaggccgccagatggcagtgttgactcatccagcctctgtgagaaccacagttttctaatgctcagaaaactgctaccacagttttccagtgcacagactttactgagtgactaggaaggggccttgagcctaatcattaatcctgttttataacctggaaggaggtacaccttgttgctgtcctaaatctcagctattcctcagatcaaagcggaaaggacagaaggagataaacccagcaaaattggtagtaacctatgctggaggtgtgcaaaattggtagtaacctatgctggaggtgtcctaggtgtatgcaggggttgggaggtgggtgggtgggggagagggaaagggggagagagagagagagagagagagacagggagagagagagaaagaagaagaaggaggaggaggaggagagaagggagcaggggactggttgtggtttggagagacaaaaatcagaacacagaatttttttggagctatatactttcataaacaaggaaactaatggacagagaatacattaaagtgctctgtgcaggctgctgactagtggcagaacagattaagactcagtgtttagtttttctacttctctctctctctctgggtttcagtgtttagtttttctgcttctctctctctctctctttctgggttttctttgttttgtgctatcaagttcttcttatttcttttacttcaataaatttctttcaaatgaatctaaatgttatgatctaaggacacaagttgataaatgcaattaagattcttggttgaagattttgtgtaggtggtattagtagaaagtatccacaaagtcatggagcaaaatctcagatttacaaagttctaggtctgccttggccttccaaagtgttggaattacaggcatgagcccctgtgtctagccttatattgacatttttcacttgcattttagaattgattgttgagaaccccttgagtgacctaggtcaagagactgctgatctgtctgtgatgggtttgatatttttttctcctcaccaaaaatgctaagaacattcatttacaaaactggagacattggtaagctcttacctttctcatcctgtgggactgcaccagcctgtcttactgcttcctgggaggttctatgcacaaattctctgggaccttctcaggttaggcaagacctccagaagacctaccagctatcttgctcctgaagttcaaggctctgaaagccttaaatgtcatgaagcatgaagcatttccaggaaatttgtggttttctcttgaaacttcccaaagagaactttttctgaaaactgtttacagcaatttgatggagaccagcatttccgagggcccagaggaaggatcagagaacaaggacagtgacagggggatttggtcatgagagtcagaggcccgtgtgatttgcaatactcctttctggaagctctaacgaatatgaataatcaaagatgccattactgcataacaagagcattggacactaaaatataacttttccgagaaattgaaatttgcttatttatgttgtttatttaggggtatggtcagggtattttattcagacacttagtgtgctcaatttattcattttttcaacagtatttctggagctcctattatgttctaggcactataaagacacatgcacacgtatgtttattgcggtactattcacaatagcaaagacttggaaccaacccaaatgtccatcagtgatagactggattaagaaaatgtggcacatatacaccatggaatactatgcagccataaaaaatgatgagttcatgtccttcgtagggacatggatgaagctggaaaccatcattctcagtaaactatcgcaaggacaggaaaccaaacaatgcatgttctcactcataggtgggaattgaacaatgagaattgttcaattgttcaattggcaatgcagggcctgggaaggagcttcctgcaggccgaacagaaacaaaatgacacttccctccattctaagccaaataacctagtggttcctgtatgtgcctcagagtgaaattgaaatcctaaccctgaagtcattttgtagaggccttaagcttcttgttgtgagatgtttcctggttcccttcagaaaagggctctgacagggtttagcagaactattgatggacgacttggcatgagtacatctggatacatcagaactttgtcacaagagtggtgttttagttttaaattccttaaataaccaataattgggacatggttaagtaatttatgaaatgttcactacatgaaatattttctggccattaaaagtggtggccatgaagacctggcagcaacatgtcagaatattaacgcagaatgctaaatgaaaatcaagagtccagaattgtacacaatgactgcaggtgtgtgaaaacatgaaaatgcagacgaagaacatccaaattaatgtagtggactggccccctataaatgaaccagtggactggttcattttattgaccattttaggacaagactttatacatttggaattctatatttaatagctccccttgaatttttgcatgattttaaaagaccaaccaaacttcttataatacttaagtttgattgtggctgcaatctagcaatcaatttaatgaaaaatatctaactggaaactttgagttgataaaaaatctgtttgatagattatttcacttttaaatagcctgttgctatcaatagatacatctgatcatctcctaattagtaaataatgaagactgttgttttcataagtattaataagccacagatattctgggatgggttgctggcaggaggaagatgttgacttgctaactgaggagtatgaacccggtcagtgctgcttctgtacataaagactgttagtttagatgatggcctcaccaaaataatattctgatttgtctgcttgattatgaaggtgcacaattagcaagaaaaatctgagactttttagacagacgtatacaaaacctctgggttgtcttgagaaaacccagaaaaccgacttctctcaggcttcatgaaggggaaaaggtgttttaacctttagcacatgttacaaaaatctaatacggcaaaagatattgagaagtggagagtttcactaaaaattattgggctaataaatgcttagagccaatatgtacacacaacacacacacacacacacacacacacacacacacacaaaggaaaaagctaatggaaaacaactaagccctattttattccgttggaagccgtgagcaatgccaagtgtccacacttaaaaatgagatacaaacacgttttctctcatgtttttcacaaatttgaaggaaacaattatcagtcaagacttgtcagaagatttggtataaatttaagggcatatttactttctcttgtcactttaacaagtttatgttgtcccgtgtcccttataaatctgctagaaaaataagtttggaatttcaaagtagaaaaaccttggaaataagatcttcagtggcttgaagtttacacccagtctggagctagggcctccacatgcatcagcacatctcattcttgtgtgaaaatttttaaattgatatgtagtatttgtacatatttacagggtacatgtgatattttgttattgcataatgatcaagtcagggtatttggggtgttcagcaccttgagttcatcacctttctatgtgttgggaacattccaagtcctgtcttctagctattttgaaatatgcaaatattgttgttaactgtagtcaccctactctactgtcgaacaacagatctcactccttccatctaactgtctgtttgtacccattaatcaacctctctttctcctctcccccacacataccaccttcccaccctctgctagcgaccgttctaccttctactcagcacatctcattctgactcttccatctgatgtgagcaagtctgtcctgaattagagctgttttctagagggcaagatcttatctttgtttattatttaaagtgtccagcacgctttgatttattactaagcacgagctattttttacttgaatttctataatgctttgttattcattcgtgttttttattatggaaatgtcaaataagccccttgtatatttcacccaccactattcatggtaatcttattatcgttgtttattttgaagtaaatcctataattttattagtaaatattttagtgctcctaaaagataatgatcgcatttaaaaatataatcacagtatcacaattgtacctttaaaaattaactataatccctcaacattcaatatgcagtccatgttcaaatttccttgattgtctcataaatgtctattaacatgtcattcaaatctggaaacaagcctttttatctctctctctctctctttccttgaaatttacatgttgaagaatccaagtcgtttgtcatgcagaatcttccacattctagatataaatgattgcattcctgtaggttctgtcctgtcttttcctataaattggcagttaaatttagaggcttgattagattatgttcaatttttcatcaataaagcaacttatgttcatataaatcttatcattgcttagatgaacaaattagacctgtttctttttcttttcttttctttttgagagaaggtctccctctgttgcccaggctggagtgcagtggtataatcatgtctcaccgtagtctctacgtccctgggctcagtggtcctctcaccttagcctccttagtagctggaactacaggtgtgtgccactatacctggctaatttttgtacttttggtagagacagagtttcaccatgttgcccaggctggcctgaaactcctgggctctagggatccacccccctcagcctctcaaagtgctgggtttataggcatgaaccacagcacctggcccagacctgtttgtattggttaaatgataatgtactagaggagaaatcttttttgtgatatgacatatctcaaagtatcattgatttttgagtttgtgtcaatatgagataaactttagtttctaaaaatagccacaaactttctttagatcacagaatcacagattccacttgggcaggacttgagcctctcactcatgtagggcccctttccaccttcctggaggtatggtcacctgtcctttgcgtgaccaagtcgggatgaggagttagttacacgcagacaggccactggtaagtctctcacagtattccagcttttccttcaaggcatttttcttctagggttgttgtctattttgttgttgttgttgcctgtttgtaacaggtttctattctatcgtgttaccctgctctgtgttaataatataaatacctaacaaattttctagactatct

SEQ ID NO: 150 - DNA, 1038 bp, Homo sapiens
cgcaggcgcagccgtgcgatgttgtcctctacagccatgtattcggctgctggcagagacttggggatggaaccgcacagagccgcgggccctttgcagctgcgattttcgccctacgttttcaacggagggtaaaaaccccagagagctgcggctttcactttcgcccttcccccatctgctgaagcctatttaggagtcaccgccgtgatggcgctgccccgggctcctgcaggcctcagaaccctgagctgagggggtccgcacaaggccggtctccctgccgtcctctcatgcgctgtgtttccctcttcaggctcgctttgctcaagtttacttgtactatactggcaattgctggagaagattttgcaattgttgcttctgatactcgattgagtgaagggttttcaattcatacgcgggatagccccaaatgttacaaattaacagacaaaacagtcattggatgcagcggttttcatggagactgtcttacgctgacaaagattattgaagcaagactaaagatgtataagcattccaataataaggccatgactacgggggcaattgctgcaatgctgtctacaatcctgtattcaaggcgcttctttccatactatgtttacaacatcatcggtggacttgatgaagaaggaaagggggctgtatacagctttgatccagtagggtcttaccagagagactccttcaaggctggaggctcagcaagtgccatgctacagcccctgcttgacaaccaggttggttttaagaacatgcagaatgtggagcatgttccgctgtccttggacagagccatgcggctggtgaaagatgtcttcatttctgcggctgagagagatgtgtacactggggacgcactccggatctgcatagtgaccaaagagggcatcagggaggaaactgtttccttaaggaaggactgatctgtgtgctcttatcaccaatcagttcagacctggttgattttgtactttggaactgtaccttggatggttttgtttattaaaa

SEQ ID NO: 151 - protein, 217 aa, Homo sapiens
MRCVSLFRLALLKFTCTILAIAGEDFAIVASDTRLSEGFSIHTRDSPKCYKLTDKTVIGCSGFHGDCLTLTKIIEARLKMYKHSNNKAMTTGAIAAMLSTIKRRFFPYYVYNIIGGLDEEGKGAVYSFDPVGSYQRDSFKAGGSASAMLQPLLDNQVGFKNMQNVEHVPLSLDRAMRLVKDVFISAAERDVYTGDALRICIVTKEGIREETVSLRKD

SEQ ID NO: 152 - DNA, 1479 bp, Homo sapiens
atgaacagatctaatttggcaagactagatgaatttgagaggagtaaaactggaggacggaagtttcgtttcaggaatctaaggttgaggcaagagataatgacggcaggatttaaagccattataagtatgattagagatttatccaggaccttcggtggcttcaggccactttttgcaaccggaagtggcgtaacgtccggtcaaggcagccatctcgccgtgagacagcaagtgtcggatccgcaggcgcagccgtgcgatgttgtcctctacagccatgtattcggctgctggcagagacttggggatggaaccgcacagagccgcgggccctttgcagctgcgattttcgccctacgttttcaacggaggtactatactggcaattgctggagaagattttgcaattgttgcttctgatactcgattgagtgaagggttttcaattcatacgcgggatagccccaaatgttacaaattaacagacaaaacagtcattggatgcagcggttttcatggagactgtcttacgctgacaaagattattgaagcaagactaaagatgtataagcattccaataataaggccatgactacgggggcaattgctgcaatgctgtctacaatcctgtattcaaggcgcttctttccatactatgtttacaacatcatcggtggacttgatgaagaaggaaagggggctgtatacagctttgatccagtagggtcttaccagagagactccttcaaggctggaggctcagcaagtgccatgctacagcccctgcttgacaaccaggttggttttaagaacatgcagaatgtggagcatgttccgctgtccttggacagagccatgcggctggtgaaagatgtcttcatttctgcggctgagagagatgtgtacactggggacgcactccggatctgcatagtgaccaaagagggcatcagggaggaaactgtttccttaaggaaggactgatctgtgtgctcttatcaccaatcagttcagacctggttgattttgtactttggaactgtaccttggatggttttgtttattaaaagcattttaagtaatgaaaacaggtcatgttaattttcccttacactaatgaggtaggaatttctctgtaaaagttgaccttttgagcaaacttatcttatgaagagggctctggtgtttacgcagccagcttgcctgaagggacctttaaaccatccagaagggagagtatttactagggttttattaagactctaatggttataaatgaaatatcttaagatttttcacttctgggactgttaagccatctggaatagctattttggagaaaaatcttcaaccaaaataaaactgtaaaaaaaaaaaataggcctttatacaagctgtagccagaaatctgggataatttttacaagcactttagtaatgttataattgagacctaagttttgatagagccaaaa

SEQ ID NO: 153 - protein, 239 aa, Homo sapiens
MLSSTAMYSAAGRDLGMEPHRAAGPLQLRFSPYVFNGGTILAIAGEDFAIVASDTRLSEGFSIHTRDSPKCYKLTDKTVIGCSGFHGDCLTLTKIIEARLKMYKHSNNKAMTTGAIAAMLSTIKRRFFPYYVYNIIGGLDEEGKGAVYSFDPVGSYQRDSFKAGGSASAMLQPLLDNQVGFKNMQNVEHVPLSLDRAMRLVKDVFISAAERDVYTGDALRICIVTKEGIREETVSLRKD

SEQ ID NO: 154 - DNA, 757 bp, Homo sapiens
ggcagccatctcgccgtgagacagcaagtgtcggatccgcaggcgcagccgtgcgatgttgtcctctacagccatgtattcggctgctggcagagacttggggatggaaccgcacagagccgcgggccctttgcagctgcgattttcgccctacgttttcaacggaggaacagacaaaacagtcattggatgcagcggttttcatggagactgtcttacgctgacaaagattattgaagcaagactaaagatgtataagcattccaataataaggccatgactacgggggcaattgctgcaatgctgtctacaatcctgtattcaaggcgcttctttccatactatgtttacaacatcatcggtggacttgatgaagaaggaaagggggctgtatacagctttgatccagtagggtcttaccagagagactccttcaaggctggaggctcagcaagtgccatgctacagcccctgcttgacaaccaggttggttttaagaacatgcagaatgtggagcatgttccgctgtccttggacagagccatgcggctggtgaaagatgtcttcatttctgcggctgagagagatgtgtacactggggacgcactccggatctgcatagtgaccaaagagggcatcagggaggaaactgtttccttaaggaaggactgatctgtgtgctcttatcaccaatcagttcagacctggttgattttgtactttggaactgtaccttggatggttttgtttattaaa

SEQ ID NO: 155 - protein, 203 aa, Homo sapiens
MLSSTAMYSAAGRDLGMEPHRAAGPLQLRFSPYVFNGGTDKTVIGCSGFHGDCLTLTKIIEARLKMYKHSNNKAMTTGAIAAMLSTIKRRFFPYYVYNIIGGLDEEGKGAVYSFDPVGSYQRDSFKAGGSASAMLQPLLDNQVGFKNMQNVEHVPLSLDRAMRLVKDVFISAAERDVYTGDALRICIVTKEGIREETVSLRKD

SEQ ID NO: 156 - DNA, 118063 bp, Mus musculus
  misc_feature (1)...(118063): n = A,T,C or G
ctgtctgtttatcatcatccacccctcatccatcctttcgtttatccatctgcacacatattaaaacccatgaactcatccaaacgtctgtcacagtttaactcttgaatgtctcccaaagacctgtgggttgaaggcttgtattctgtaggtgggcctaggggtagatcgttaggtcactaggggtgtgctgttgaaagctgaaactggcccctgccctctccccgtgctttgcttcctgctgggagataagaactcttcctacatcccaggcctcccagtcgggtgaggtgctatattgccacgaatcatgacaccctggaatctcaaaagctgtgaacccaaatcattgtttcccttccataagcttttcaccctagggatttgctctcgtggtgggaagctatcagaaccctcgattccatttctgagccacctgccttgtctaggtcccccgtctctgtttctaacacctcctcatgcccagcattccctagtcatagcatcctaccttctcggaaagatggcagacggtgtgtaagacagtgatccctgaagatgatggcaaggctggaaacctcttgcagggacagcagactcaacatggaactatttcacatgctgcccgagtttgagaggagactcctgtaagcacgcctgcagggctgtcagcacggagaagtacagcacactcattcccagccacttggaacgtcactgcatgattggctcatgcacacacatacttactatgtatgcttttaaaagggtttgttattttaacaaattgtgtgggggggggggagagaaagaaagtgcagggggcctgggagggtggtatctgcacaagtgtgcaggtgcctgtggaagccagaggcattgggtcccccgatatggagttacaggtagttgtgagctatccagggaggatgctgggaactgaactcaggtcctgtgaaaggattgtaggtgctcttaagcgcagagccatctctccgggctccacactatctttttttaaagctctgtttcagagacatggagggtactggataagggtcgcagtgcaaagactctgaggcaggggcatgtcttctgtgctggaggcctgccaaaatttcacaaagcaagcagaggaaggaatgggaaaggaagtcagatgtgacgaaaggcaagccccttaggtggctgctgtgggaaccactagtcccttactgtgtgagcttcgggttttataggtagaggaagaaggctcctgacttacaaggccaggagtaggatgtatttgacaagaactagggcaggaatccatctgataacaacatttgatttaggtgagagaaggcaatggtgacttaaattggttaatggccaatgtaatgtcactagagggactttaatctggattaatttttagtttgtttgcttggttgtttggcttttccagacagggtttctctgtgtagctctggctgtcctggaacttgctgtgtagaccaggcttccagatggtcgcctgcccccaccccctgcttagagactaagaagcccctctgttgggcctccttctccaaccccagctccactcttgccaccaggtagagcgtcagactgctaattgtcagagcaggatgtgcttcccctacccttttgctttgcatgatgggaatttccctttagtattctcagactccccttaactcccatcagggttgaagggtggattctgactgctgagttaggggtcgggttttagttacttttctatttttgtaacaaaaccccatgatgaaggcagctcataaatagagcatttaattgggcttgtggcttcagagggttagagtctgtgaaggcagaacaaaggcatggtggtgggaacagccatcttcttttatttgttgagacaaggtatctctatgtccaccattctcaacatgtggctcatgagtctgttggcaaacttctatttccaaaaatatttacattataattcataacagtagcaaaatcacagttatgaagtagcaacaaaaataattttatggctggagttgccacaacacaagaaactatgttacagggtcaaagcttaagaaggttgagaactactactctatgtagccttggctgtcctggaactcactatatgtagaccaggttggtcttaaagtcagagagatccacctgcctctacgtccctagtgctgggtttaaaggtgggtgccaccacacctggtttgagagttcacatcttgatccacaagcaggaggcaggaagaaagacagtaggattgtctcaagtctttagaagtttcaaagtttgccccccagtgatgtactttctccaataaagccacacctcctactccttcctaaatatttccaccaactgaggatcaaatattcaaacacaatcatagggtccactcttaccaaaacactacatctgcacgctggtccccataggcacatggccatatgacaatgtaaaatgcattcagatccaacttcaagtccccatagttcaccatagtctcaacactatttagtaacaaattacagccaggcaatggtggcaccagcctttaattccagaactcaggaggcagaggcaggtgaatctctgagtttaaagccagcctgtttgaggtcagagctagttccaggacagccaggactaatatggagaaaaattacaaaaaagcaaattacatactttcaacatacagtgatatggaatatatattaccattctgaaacagcaggaatgggatgtactggcctggagcaaacttgaaacccagccgagctagatctcaatcctttagctccatgtctggggtcagaggacttagatagctccacctttctggtttttcctgtctgcaatgtacttttctttcttgggccagtaccactccctctgtgcagccagccacctggagtgaagacaaaacacaggccagtaaaagaatgctctatgtcgggctatctcaaactctagagtcaactaccacaacctgacctagcttaaaatgtttccaaaccctcactgcctataaaaaaaggttttgttttgttttttaaaaaaaaaaaacatttcacatggctctccatatcctttactgtttagctccttcccagtcagcccccctgccgttttccagctccttacccagtatgtagactctgctggccactgctgtcaccagataactggggaaagcaacttaacggaggacaggttatcttggctcagtcttagagccaagggacacccatcctggtggggaaggataatggtaggaacatctcggcctatgccgtctgtcagagcatcaggcagaacgcttggggtcagacccagcggtgggaattgccttcaaaggcctctaaagtgctacttctacccgtaaacccatctcctaaagaccccacaaccttcagaacagcaccatatgctgggggaacaaggcttcaaatcatgagcctgtggagacatttcagattcaactcatagcagaaactgctttatgagaaaaacccgtttcccctgcccctaattgtgccaccagcaatgttccacagaggtccatggagacccagggccttagtcctcagacactgaaacataggtggtgttttgggataatttgttacacagcgttatgtctccccatgactaatttcttcttgttcttcctgccttggctcagacccctcttcttcctggaagctctccctaacttcctgtccaagccatcatgttttagtcttccaatatcccctgcactgtctctagcaatactacctggggctgccttagagagcaactctactccatctgacttggtgtgtgtacacaggataaggctgtgcacccagagacacaggtacctctcctcctttccccttctcccctcgcccttttcctctcccccctcccatttgtcccatgccctccccttctcttccgctctcctgacatggacagttagcattaatttgagatgatttttaccaccttcagttggaagagttcaaacacacccatggcttagctttgagggcttcctcccctgggactttctcctactctgtacctgacattggtacccacacctttactaacttcctccccagtttcttaacatcagagctatgccatgctcatctccacatgcagaacatgttccacgaagaggtaccagtgactagctgtctgcataaggaatgagcaagcaccttctggctggttagaggacttcagcggagcaagaaagaatagtcacattttcagagtcctgtttcccaagatctaagttcctttaactcatcactgagtttttgacaatggattattgtattttaatccttcttcatccagatcaggctgagccagccacgcctatagaacaggaactagtatctcattacagaaaacaaacccaacccagatattccctgcctaaaacaacacgcagtgatgtttctggcaggaatgggtagaagagagtgagcatgtggggtcaaggaagcttttcccttagggacattctttttgtggattcatctagtcagcaagcgtttaatgagcacctactacatgccaggcatttcccatcctcaacttgtagagcagcacatttgatacctgctgttgggtcatggatcaggcacatttaggggcttagaaaattgctatcctgtaagaatcaactgggttgcctctggtcaacacatctcaaaagcccagtcaagctatcctgtcgggttgcaatgtcccaaaatgcagctggagccgacctgtccctgactgatcacatgcccatggatgctgttgattcagttgcaagttatcacatggcatccctggagggcagcctcacagccaggcagctcccttctccaagtaactgacccaagaggtagtgagtttctgtctgagacagaagctgctatcttctgtaacatcatctcagaaccgacatcaatatgtgatgttctattcatttggcacaagctagtaaatctagcccatgcgctgggggaggggatggcccaggaccccaggacctgaggtcacaatcagtagtgcagcctcaggcaatctgccacaggtataaggacttaatacactttagctcaggcctggagatagccatttcaacaactcgtccaggtcacccagctagagacttctctgactctaaaagtggcttgtccaggctggctggggtgagggaggaaagagaatgccagtgtatgtcccttaactgcagtataaccgatttcccacaattcagtggcttaaatgcttgttatgatatagtttctaggggtcaagatttaggagcaatttagctggggaattctggctcagggtccccttagaactggagctaaagtgtgggccaggctgcactctgggctgtgacctgggtcagtagacttcctggagggctcctcacctggctgtggcaggagccctctgagagaaagcatccttaaggcatggtactgggatttccccagaaaaagaggcctgtgagcccagaagctcggaatacccaagatacaattcgcaaaacacatgaaactcaagaagaaggaagatcaaagtgtggatactttgatccttcttagaagggggtacaaaatgcccatggaaggagttacagagacaaagtgtggagcagagactgaaggaatgaccatccagaaactgcaccacccggggatccatcccataaacaaccaccaaacccagacactattgcagatgccaacaagagcttgctgacaggagcctgatatagctgtttcctgagaggctatgccagtacctggctaatacagaagtagatgctcacaatcatccattggactagagggtccccaatgaaggagctagaggaagtacccaaggagctgaaggagtttgcagccctataggaggaacaacattatgaactaaccagtacccccaaagctccctgggactaaaccaccaaccaaagaaaacacatggtgggactcgtggctctagctgcatatgtagcaaaggatggcctagttggtcatcaatgggaggagaggcccttggtcctgtgaaggttctatgccccagtataggggaacgccagggccaggaagtgggagtgggtgggttagtgagcagggtggggaggggatgggggggttttcagagggggaaccgggaaatgggatagcatttaaagtgtaaatgaagaaaatatctaataaactaagcctcaggagtcacactgacaatatcctgttgacttacacaggctagacctattcactatgggaggtgactattcagagactggggctactggcagatgaagaccactggagactgaccaccacaagtaccataatatcagtagttcccaaactcaactgttactagctgctgccatgttcaaagaggtctagagtagtcccacatcttgtgccacatgtctgatttcctctgttccatctcccacagtctcctaggttggttaacaggagatgggcagctcgctttgcttccagacctcaaaagtccctgcaggtacatgcaggtcagtccactcccatcctccccgacctatgagaagaccatgtgaccatgctgctgtagaaatgtgcctcctagccggggagtggtggcacatgcctttaatcccagtacttgggcggcagaggcaggggcaggggcaggggcaggggcaggggcaggggcaggggcaggggcaggggcaggggcagaggcagaggcagaggaggcagaggcagaggcagaggcagaggaggcagagacagaggcagaggaggcagaggcagaggcagaggcagaggcagaggcagaggcagaggcaggcagatttctgagtctgaaaaaaaaaaccaaaaagaaaaaaaaaaaaccaaaccaaaaagaaagaaagaaagaaagaaagaaagaaagaaagaaagaaagaaagaaagaaaggaaagagagaaatgtgcctcctatacatgtggacaggagcctgatatagctgtttcctgagaggctatgccagtacctggctaatacagaagtgggtgctcacagtcatccattggactagagggtccccaatggccctggcattcccctatactggggcatagaactctctgggtggctatggaaacctccactcaaattgggggtgcagtcactagccagttaatccagtcctgagttgtgttaagttctcccaaggaaaattgtaggacattaggtaatagtggactggcaaattctctgtgcactatttgagcagtcaggtgattgggctggacgtgagtgttaccactgagttccagtgtaagcgttcagcaatccaaaacaacagtagttccaataagatggatgcttatttcagtcttatataaacacatagaacggcagagtgataagacctgggctctttctgtcttgttgctttgttccatgtggtttccatttggtggtttgagatagtggcatccacattctaggcagccagctgcataaagcgacacacagggcaaagagcatacatcaactcttcctaaagccaccttctccctgcatttcaataacttgatcacatagacatgcctagctgcaagggaagctgtgaaatgcaagtttctatgtatccagccaaaaactgggagctttttctctctgtgtaaaagataccaacaccagtcagtctttttgttttttcaagacaaggtttctctgtataaccctggctgttctggaactcactccgtagaccaggttggcctcgaactcagaaattcgcctgcctctgcctctggagtgctgggattaaaggcatgcgccaccactgcccagctcaggcagtcttatcgtcatttactctgctgggcattgttatccttgatcatgctcaagggcacatctgagattctttaggagaatctgggctaaagatgagaatagtccccaagatgtccaagagctagtctctggatcatgttctaaaaagggaagacatgagatcaattgcccacaccatacaacttctattttgggtttatctgtacccagtggttccagaaggtcccaggatgctttttctttctgctgctcccaggctccaggactggctaaaactttctcatttcccatacataagagcatggggtgcgggtgtttgttgaatgaatgaatgaatgaatgacgaatgaatgaatgaataatgaatgaatggatgaatgaatggaagggggattccggttgtcagaaagagaagaacctggtggaatcgcccatcactgcagaccctgaatcttgctgcccgcttatccttcaggaaaccaaggagctttttatgtcaggacactgcctccctgcccatcctgccttttgaacttggatccccacttttctccttaagttgttgtcttaaatcgcagctttgaagaaggcatcagcagcagaacccagggaagttcagaagtcagatttcccctacatgggtgtcctagtttgctttttctctgctgtgataaactctcaccaaagcagctctgggagcaaagggtttatctggctcatacatccacacgcccttcagggagtgaagtctgggtaagtaggtactcaaggtaagaaccatgaagcagggccgggcgtggtggcgcacgcctttaatcccagcagagggaggtggatttctgagttcgaggccagcctggtctacaaagtgagttccaggacaaccagagctatacagagaaaccctgtctcaaaaaaaccaaaaaaaaaaaaaaaaaaaaaaaaagaaccatgaagcagaaactgaagcagagacctgtggaggatggaaggctgctaatgggctccactgctcatatgcagtagctttctgatcccaggatcccatcctaggaatgttgctacccatagagggctgggccttcctacatcattacttaggaactaagaaaactttacacacatacaagcccttaggctaatgtagtggagccatttcttcaatctcttccaggtatgtcagattgacaactaagaccagccaatcacaaaaagtttagagttcagctgcctcctcctctagcccagcaagttgagggaggttttcctctgtacttctgtgtttctgagaatggaggctcctaggggcaatcagcggtatgttaccatttctaaccgtgcaaactcagagcctctggataaccctgcaagttcctgacttcaggttggtagatgctcaacgagtactggttggcatcaatcccgaagaaagatgatagaagtggctagctaagcccaactctaacaggtggagaagctgtcactagatgccaggctgttcactaaagcagggccccaactacctcctttgatacctatgaaaagttgaaaagtgggattaacagttatacagatagagaaaggggtggtggtggatctcgggagccagatggcttttcctaagaagcaagggatgggtgggaggtgggtggactttctcaatctaggactgcgttgcccatcccccagttttaaccttcacccagaactagcaccaagcatggacccgcaatttgtagcatttttctctgatcttcacaacgcaatggctttgttttacaagcacaaaacccactgcctgaggcagagcgatttgtcctgaggccccacttacgctaggaaaaaagatcagaggccaaaaagaaccaaagcgggagtcttggagacctgggcttgggtagcatcccactctcgggccttcccattcagcgggccctcgggcccctttaatggggcggcggaaggggcggccgggggatgtggcggcgcccaatgggctgcgtggagcgtcacttcccggcggcgggaggcgagtggcgagtgtcgggcaggctggcgggggcggggcggccgaggaggcgttggcagcgggctcggacccacgcggcgctgcggcccgcctggcctgcaacgctcccaccggctcggcggcacgatgccctttgacttcaggaggtgagtgaggccccgggcccgaggccctctgcagccggcgacgaccaccccccaccccccgttacgtgcaaatgcgaccctggtgcactgtgcacgcctcggcaggccctaggggaccgcggccttcctcggggttcgagccctacccccacccctcgtgcagccctggcaagccctcgcactctgttttccacggcgcggtgtccccagcttgcccctgacatctttcattcccctcccccaacctgggaaccaaatctcctcccaaatcccaaataaaaggagctcaggcatcctcaggctttctccccagtcttccctagtggaccctgtcctggctgacaggtggggccgcgcgcctggctttgcccggtgggatctgagggctgcagccccattcaatctggcagcagttggagaagcttagttcttcagagcctgagaatcctctacctaccagatgtggaggcttgttcccgcaagccatggggacagtgcgggaagaggaggatgctgggatctcgaggttctgcagaaggttctttgcctcctggaacaccattgtatagggccaggccttctggaagcctgcatgggaagggcctccccaccagacattcccttgacataagacgctctgagatgctctgggctgttgggatactttggagcaaaaggattagaagcctggctgtacctctctacccagctgcttagtagattctcaatgttagaagcaaaggcttagggtgcagcccctcaccgctcagctggctgaccccagcaggtgtctgggcatgctcaaaatattggtttcacctcttgcaaattggtactaaaaataaggtcaccacctgaaagacagggattgtaaggcacccctgacccagtctccatcacatggaactcagaagtagggcatctgtgactgaggagatctgtgagcgctccccacagccagagaacgggtattcctccattggtcacagtttcccctcatcctccccctcttactgatgtgtatagaggcagaacagagtgacaaccaatctaaaaacggcccaagattcggatcatgtggtggcatatgggcaacctggggtcagggcccagagaggacattggtttcagacctcttaaccagccaaagtggtttttagctcactctgggcactggtactatctggcaaaccagcttcctgcttgcttgaggtagccccggggtccatacctgggcttagacaaaagcatacagaccatggtagctttgaaccgagagggctttgagccagttttagggacacccattaccacagtgtgcccatgcagaaagaagggcagtgggcacatccaggcccccccctcaaacctcccagggctgaccggaaagggtcccaaccctcctgtccccacacggttctgcaagtcctagggattttgagtttgttaaagaagtaactgttctggttacttcatcttgtcagttctctgacccgcctgcatgccccgcctgcatgctggaagggctgggcagatctgggctccagttggaagtttgggggctgggggcaggtgagatgaaaaaaaaaaaaaaaagaaaggaaaacagctggggccagctttagccttgtcagggcctgcttattactgactagtttaaggcattgatatttaaggagcacaccgctcaactctcagctgctactgccttggggctttctggatgtgtctcaggccctgagtgcccgggtgccacagggttcccactaatgccagttgagaaagtccttgcttgctggggctcactggagaccagtaagaatggattccccaccgttcgatctcctcacgcagggtgagctgtgggtccagcccatgtctttcttctctttcagacgttgacatagcagagctctaggactcactgtgaaggaaggctccgccgttctacagacctttaccacatacagggccactcatcggcttgctgagggttgtacccagtgtttagccacctgccacttggactatcattaggggatgggtggcatatggcacaaccctgtggaattgccagaggagtgttgcatgtgtgggggggagggggaacgtgtcacatgactgggttctaggagtagccactatataagcaaacttgacatccatccctttgtcactgaagagagtgaatgagtcttccttttaaaccctggtgagggtgacccctctggcaaaagcactttgcatggatatagataaagctggagtcggagtttggcctattggcattgaagccttagctctggggcacaaggggaatcttgaaaagccaccactttgtcaaaccttttaatagtggggagcacagggggcgtacagtgattagaacatccccatttcccaccagttcaagaccaaggggaacccagcttcctaacttgggtgtgttttcctgcctaggaaatgggtatgatcgacatcctcacatgagaccaggtggcatgtgggaccagcaagcactgtcctctgcctgccgccattattgtaccctttgaccgaggcacctgctctgtaattagcgaattctgccatcttctcttccctttcatcagtatctgacctcctaagggccaggatttatatccagtttgtatgtggttgcgtctgcaggtggaatggtacttgactagaggtccccccttgggcaaaacacacctctccagtttgtccagtgtgattgcatgtgccagctgctggtggagaattctgcatccctctttcctgtttttggtgcttggaggagaacccaggactcgtgcatgctaagcaaattcccacagagctgcatcccaaggccctctctcctcatccttgaattggccctttctgagttttaggggttaagggcggaggttgagccttaaatgattaccgtgtttgctttgttcccgttgagcggttttactgatactgatcattgaactcacagaactggcttttgttacctaggtccgggggtgttgttcccagttccggttgactggtggcacttgctgcctgttactccagaggctttgacagcctccgtccccagagcctgagccccactttcaggagagaggcaatggctagctctgccacagtggcagtccccgtgttgagaccccatgatctaagagtggtgtgttcctcccctggctagctgtgtgctcacttcaaggagggagggggatgtgtgctgcctgtcgggcaagaaagctgtccttgcagcgcagagcccaggttcagatgctgatctgggggacccagtgcacaatgcaagttcagttctgttgagaaaggatagagtttcagtatgggtgaccccgagtgacagcgcaggtcatttgattgtggtgctggccccatcatgacttggtttggtctcctccactgcttactgtagctttccaaaggtcttctcccctcaggggacttgagtggaccttgcaaaagtctctctctctctctctctctctctctctctctctctctgtctctgtctcttgtgtttccctctttcttgtttgcagtgctgggaatggaacccatgaccttgcacatgatgggcatgtattttaccactgagctaccccacctgggtcccagcatgaccctcttgaagttggcttgaggtttttctgcaccctactttcagtcttcaaatgagtgatgttgatctgagaatccagtctggtttcctcagtgtctgacatgccttccccagtgggccttgctgaaagctgaagtcccttactctctgtggtaggctaagctgaccaaccactgaggctctgacagttcactgtcaattgagggaccaatacaaatgcccccatttctaccttggcattccaggaagagccagagaccgatgggttagtccacgtacttcacggcatgtttataaaaatattactgaaaattcagactggaggcggaatgacctgtaaaacccaggttgagtttattgagcttgtccaggtgctgagccctgttgagtgagctgcactgggggagtctcacaggggtgactcgttcacacatacacacacacacacacacacacacacacacacacagagtgagctgcactgggggagtctcacaggggtgactcgttcacacatacacacacacacacacacacacacacacacagagtgagctgcactgggggagtctcacaggggtgactcgttcacacatacacacacacacacacacacacacacacagagtgagctgcactgggggagtctcacaggggtgactcgtacacacacacacacacagacacacacacacacacacacacacacacacacacacacacactgcaggccctgaagacccttcttagtcatcccaccttagtgagcaggcctgagggcatttgcaggagctgatacaacactgctgttcccttgtagagcagccgctctgccccatgggctagaagcgctctctttcctggtccctagattcagagagaggcaaaacctcctctaagaatgcatctccttcctccttgctaaccctgccccagcgtgctcctcatgaatcttttaaccgtctgcaggcactccatgcttccctttctaccccttttcctctcttcttctctctatcacctgattccataatcttctaaaattaattttttgctaaagtccccatcccaaacgtaaatgtaacttttattcatcagacgtgattgttgtcttggaggcttactgctggaataaacttaccctttctagctctttctgaactcttggctggttgattcagctcagttgttttggcccaaactcctgtctaagctgactgattcaaactggctcctctcagctttggactgaattgctctacttggccttaaactaactctggcagtctgttctaatcttctgggtccttctcgttctctggataatagccgtgttcatgcacttgcctggaacagtccctctctggccatttggattcctgactctggtaaggaaggcaggcattctgcctgaggcttgccttgcacctccagatcagtgaggcagcacctggttgcccatgggcattgcttgaaatcagaacagagctagctgtgggtctgctaaagcttttcagtgagtgatgccaacccagaggtgagaaggattgctctgagttggaagagtcacaagcaggtgggttggagccctcagggagcagggcattggaggagccctggtgggcaaccctggagaaaagagttctggccctacctgaccctcctgtttgatcttaaacagtctggttttctacttctacagtggccaataaagagagccaggctcagatctctctctctctctctctctctctctctctctctctctctctctctgtgtgtgtgtgtgtgtgtgtctgtgtctgctggatattaagtgtagggcatagctggtattctcccactgagttatactgtcacccctaatattttgagataggacctgctaaattgcccatactactgtagcatccatgaagggctgcatggaaggaaccagggcctgggtcagcccagttggtgccagatgtgtgatctaaggagccctgctgtcttgtgcctggcaccgtttctcagaatacagtttgacctgttaaggaagggcaattagcctagtcatctgttgtcagcttgagtgtgtaggtctattaacctaattacattggttatatatgtgggaggagtacaggataggcagccctccggcactcctgtgtgtttattctgaaagttcgtgacccacagggaaagcaggaagaagccccataaaagccacctcatccgcagaggctgctgcacctacttgtcttgtttcacagccatggagatcgacccccagacatttcagatctcaaagttggtcttccaaggaggcccttggtcccaagcgcaccagaaggcacagactccttgtccaggaacaccagctgccctccaggaacctgcctgaagcctagctggacaggaagcaagggctatctgaaatgttcatccaaatagtgggaactctgcccgagatgagaggcctggcagtggccaaacttctaatgcagtgaactcacaggccttatgtgtatgcatgcatttttgtgcttatagttggaacgacacataacccaattttaaagatgcacaggggacctaatatacagctctcaaagaatagtcaggtggttagtggggaattgagtagttctacatcagccctgggaaataaaaactgaaacagttgtagctgccactcacacctggcagctgctgcctgcctgctggtctggagtcccagcagctccttcagcctcccttcttgctcccatttgaggctgagtcttggaagtgatgtttcttgaagtttcttaagcactgagccagtccacacacatcacggacaaccgtgcaggtcccaagagacagacacaggcaataagacttcgttgtctttgccttatttgcgtctgtaataaccacccagtaaaattgatggttgtgtgtatgtgtgtgtacttctaatgatatataagacatgcttgtgaagtcacaaccgccatgtggatacagaacaggtccaggaccctagcaaactcatgctgtcactttatagtcaggtggcgttaaattgagttttgaaatgcaggaagaatacttgagatctgccctcctgagacactcaacatgttagctgtggcagatgtctgcagcaggtctacagaaggtaaccacagtatctgaaactgtctatgggacagctccctctgtccctccctagtctgtggcaaccaccactcacttctctgagcttgcctgtttttaagagtttacggagaggagtcactctatgtttgtcctgtggctggttcacagcatttaacattaagtccctctacaggacctccttttttagtgctgcgtagtactccgatgtgtactcacaatgctgtcttatctcctcatctctcaggggaccttgaagttgttcccacagcttggctggtgtgcttaatcctcagcgaacagagatgtggagacacttcttcatgagattccgactcaaacttgtggagagtaatagatgccaagtaacgaggttgctggttcaggtagtctgtttttaattcccacggtggttatgctgttgttagtcccagcaacctgactccttgccctcaccagcctttaccttttgtctttagatgacgtcatgcagggagatatgaggtgaagctccaggacttgtttgtaaccatgaacttttccattcatgccattttgctcccccattttgttggttagactctaagatttatatatatatatatatatatatatgaataaatgcctaggctaaaagccttggatctttccctgactagctcataccttaaatccctttattctagtctaagttctgccaggtggctgtgaccattgtcctctgtccatggggccgaatcttctcttggcatgactgtccctctcccagaaccccctcctcctactgggtgtcccaccttctaattctgcctcaactcattggccaatcaactttatattgacaattgagtctttcatagagtgcacaagagattatccccacacctgtttgccttgtcccctctgctcagaccttcccatggggccacgtgtacttttgctgtagagatgaaggactccctgtacgtcttggatatagtctccttgtcagatctgtggttggagaatattttcttccatcccctaggttgctttttctttccagtaactgtttcctctgctgattccatattagaataggaagttagagcccagagctgggaagtaactggccaggcacatagctaccaagttgtgtgcaagtctggaatttcagagctcactcataggatgtcctgcttttccagacaccctgagcgtactggttctcatgaatcctggtgaggccttgtctgcgtcacattcacaccagaagctgttagtgctaggaattagctaaaacgtccccagagagcttttggagtcctggtgttgcttggcctgctctgatgttttcctgggtcccaaagtccattcatggtatacagtgtctccagacctcccaggaatgtgacacagagtctgggccaggatgctcttctccattgcaaatgccccagaggatgcctggctgctctaagctgccccaagcccttcccatgtggcagatctctcgtgatggctcttttctcaccattcagtagctggggtaccctggaccactgcaggccttagtttttctcatttgtagattagagtgctctttcattgcagggatctggagaggccctggcccagcagctatttaacccctgtattctcactgggactggtagaccacagtggctgggcacatggtgtgtgaccatgggaagcagggccctggctctgcaatgccagtgatgcacacctgagagtccctgggacaggttggatctgggctaccctttgcagcaaccataggtgacatcagtatgcttgcctgagaggaagtatcgcactgagataatccaagagctgcctgtggctagctagaaagctgtgtctgtgtgcaaatgtggcttcagtgtgtctgtgtagccctcatcttttaagagatgacaaaaagcttaaaatgatgtacagatgatcggctacagactccagttttgtttctgttaaccttcattgtgagcctaacaagtctcttgtgggacactggccgtgtacaatcctatgtcccactttctggccagtgtgatcagcatgtgttcactggatggacaaggactttgagcagagcccctgcgactcttggcccgtggccagaggggtatgtcagggttctgttcccacagggtggtctagatgaggggtgatgatgtctcttgagctcccctcccagcagcactggaggttgtagccaaggctagccagctctctcctgaggggtgtgcccttcctccactccgagtaccatcagcgcccagccatcaggctccctggggctgtgctgcactggcacgtaatgtgcccactgggcagcttatatgtgggctaggccagaggcttgccgtgggtctcctcggtgcagaggcagggaggaacttggtccctgctggcttgagaaaggactgtggctaagatagcacaggggcaggtgacgcagccaagactaacgtgcctgtgtgacgttagagctggctttctcagcagcctcatattctggaagacgtgttatcactttattttcttgggggggggatcccacagaaaccccgaggttggatgttatctactcagttgtatttatggtttgttgctatggaagctgggggtggaggcagtggtagtccaatggtgaagcttgagtgactatttcctgtcactgtggacatctttgggtaggaagttaccattgagcactgctaaggagccgcagggcaggagacaggacttcccgggtgggcttgcagagtgccttccagaggccgaagtagccaggtgtggggagctgttcactggtcactaggacctactgtgtgccaggtgttctgggatctgaggcgcagacaaacccctgtccctgactccttggacttgattttagttctgacattttatttcttggttttttttgttttgttttttttgtttttttgtttttgttttgtttttttgtttttgtttttgtttttaaaaactcagtgaactttcaattttgaactaactttaggtttccaagaagttgtagataaggcagagctgaccgctgttcccactgtgcacgctgcccattgccacatgggtcatcccagctcaggaagtgacaatggcatagggtcagtgtcccatgcaggcctccacgtgccttcatgctgcaactccagtccccactggccagggccattgcacaatccttgactttcatgaccttggctgtcttaagagctctccaggggccatgcaacatatttcccccctgaggcctgctgacctttcttaccagtagactgggttgtggggctggggaagcaaccagagtgagcaggcctttctgggccaccctctcaggacaccagaaccgcatggcatgcattctgatctctacctgtcctgtctttcttacctagctgctaataaacattctgttgggaagtgacaccccagggccaggccaccttgggtgagtcacatggcagtggccccacaacagtgggccgctggattactttgtagctgtgcagctatgagggcacaggtgagggggttgggaggcacaggctcagtcaggatctaacttccattcatcgcaggtctgcaggctgggacgtactaccagggctgagagtggggaagagccagtaacaaagggtataggaactaagtcctgagaaacctgggacccaggagtggtgactctgggcatgtgatcttagcccttggaaggctgagtcaggaggagtactcctggtctgaggtcagcatggcctatagagtaaggccctggcttagaacaaaaccatctgtaaccgtgtcttatttagcactggaaagtgttctaaggagcatgagacggcagctcttacagaaaacatcacctcgaggcatcacccagcttccttcacgtgactctctggaagcaaattatctctgtcatatcttaattcatagccacggcaaagaacagctatgaccttgtatagcaaagccctgtacacggtacgccgtgtgtgtcttcatgtggtctttctcaggggtgctcaccacattgtctgctttctgttttctgactcatccttctcacccagccctgaccgtggtaaccgctctcctttgagcgtagtgggttctccttcccttcacatctgcagtttgttttacttcacctagtttgtctttcatctaggtcctttctggcacaaggcgggatctctctctctctctctctttctctctctctctctctcttgaaggctgaataatattccactgtgtctgggagctgcattttctgtgtccctccatcagtggtggctgttccacattgtggctttagtgactggtgctgtaatcaagggtgcaccttttgggatttcatttcctttgggtatgcagagaagagagattactgggttgttctacttttgattccttgtttatcataatggctatgctagtctacacccctgacccagctgtgtgcaagcattctcctaactctcccccacccacacttgttgcgttttggatccagtggccgccatgctaatggctgtgtggtggtatcacagaccattttagtttgcatctccttgacagttagttgatgtcaaccaccttttcggtgtgttcttggccgtcttgctcatttttgaaaaagtgtctcaaatgcccacccatctgcctgcttgtctgctcattaaatcttgggtattaaatcctttaatcagatacacagcttgcaaatgtttctccctgattatcagccgcctttttcatttgtctcctttgctgtgtagatacagagttcgctgtagtcttagctatgtgtttattatctgtgacacattattactcatttgttactcttgtagcctaatctggctgctcttcaataagccatattctgccaggtgctgtggtgcacaccttcaattctggcacccaagtgtcagaggcaggaggacttttatgaatttgaggccagcctggtctacagagtgagttccaggacagccagggctacacagagaaaccgtgtctcaagcctccctcatcccctgcccccccacgtcaccccctaaaagtcatattccaaactagtgatttcttccaggaaatcttgtggtttctggctctacatttaggtcttacggtttgtttttctttaatccacatcaggatgattttcacatgtggaataggacaggcatacgatggtctcacccttttacatgtaaaggggcaggcttccgggcaccgtttactgaagggattatcttcaacccttgtgttctcttgatgcccttgccaggatgagccgaccatgtgtgatctgccccccagggcctgtgcgttggtttttatgttggaatcattctgagctcattactatggctttgtagtataattttatatcatggagtaggaagtctccatccctgctctagctgtttggagtcttttgtggctgcaaacaagtcttagactttcttctgatttctgtgcagtctcggggttagaggtgccttggctgcctttttcttcctttctctttcttttcttgcctgacacgtctgctgatcctgagtggaggtgtggagagcagcacccagcctgctgccagattccatcagctgtggagttttcatagatgactctcatggcaaagaccttgccctccctcaagggtagctgctgtccccaagcttgttatgcatcaggatcgtgtgggtcccctctgcgtgtgatgcttctcatcggctgccagggcagaccagcctcgcagaccagggctggagtgcgcacctcgtgacctcttgtgtgcgtgccgggcaggtttctgtcccctgcgttcaccacgcacactggcttgtcactttcctgtggttcctctggccaggcattagggtgacatcagcctcataaaagggtctcttaggaataactcctcccagccttcttcctttttggaagagctgatatcctggcatcggttgactctttttgcagaggccagagacttcagctgtgaagctgtcttgtctgtgggctttttcttcattgggaggtttatttatttgtttaatccaatttcagtatcttttattcctggcttcttactggtccttactgttgacagggtaacaggtttttctaagcttatccctgaggactaggaggtagtgttgggctccaaggacagcatctcactacctctgctgccagcttcaggtacctcctcctccaggaagccttcctccccattcccccccaacactgtccatccctgactacttggccctcggacagcctcagctctgtgcatgtgtctcataggccctgtcacttccttactagtgggcttccaaggccgtggtagtggcaggcttgtgctgtccttagcaggacctggctgagagccttgcacacaatcaggtggtagcccccaggtgacatgctcagcagaggcacggggatgttacagggctagccatctgcttcaggtcacagtgaatctgtacctctctcagcctcagtgacctcgttgaaaggtataggcacaatgataatcataccaggactgccgtgagtacagagtgagcactctgatgtcttaacatggggcctggcccccttgggtgctcataacctgtctgttgtatgggaagcaccagcacaccaggctgctgggggggatgggtgaagggcagacgcccagaggtgctgcctttgctgtctgtcagcttcttccagaaaggacccaagaagcttggcgtcttcgtgccacacacgcttattttctccccgtaaagtccaagcagagtcgacgctctgcctttgtggataccgggagaccaggttcgttcactcaaagtatataacctgcaaggtaggttagggtaccactgtctcttgaaggtaaggaagtgaggtctggccatgtgccctagaggagaaaagatgctgtcatctctgtcaccatgactccagtcagcgctatctgcctctcccttctgccatcttcattattttgagccaactcctcaacagatgcgttacttaaaatgtttcttttctcttccttcattgtcccccacccacctacccccctccctgctgagacagggtttctctgaagccccaccttgtctttggagcaatcatgtttcttttaagtcagtgtttgaaacactctgattgatgagaggtgactttacacatcatcagagcggagaagcagagtcccctgcatagatgcagtcccagctgcagcgggggccgggggccgggggccaccggatcggctctgtttaagaggacccagtgatcctccgaggccccagtgcacacctaagcgtgctggtagagtaccatcccccacatgccctgcttttctattcatacacatctctggtagcttcattcataaattagagccaagaaccgcaactaagaataaaataatggtaattgtgcaccgcaccggaaggacgttactgagtaaaacacggttccttgagcatagaccctgtgaatcttccatatggtcggtctgataactcaggtacagctggtgtgcttggctcacagggcaggagtctaggctcctcccatgttctcaactcccttcctctggggtctgtctatccactccaagttagaacatcaccagccctgttcattgaaagcccactcattgctggccctgccagaagcatggattcccactgtgggtaagaagtgagtggggtccagggtgtgcttgcccaccttccctctctctctccttcctccctctttcattggggcttctgagaagctaggactgcttcccccatcagctgttctagctgccaggaggatgggtagagccacaatatgagtgggtgttttccacgcaagtcctgaaaaaggaaggagcaggtggtgataagagagagctaacagtgacgtgttaacgaggcctctttctcagaaggcagcctctgggctcctttgggctctctggctccccttctctcctccccagttgctgccaggctctgcaggccactgcgctgttacttggtacaaaacaatggtccacttttctgttcagctgacccctgcctgccctagtggggaacacacctgagaacacaccaagtccacccacttagggggcctggcgctggacctgggctctgcacctctaaccctgtgggagggagggaagagacactgacaacctccgtcacacagcactgaaccctgcagcccccactgtgagaggacacctccctcctcagggatggactgggtactttgtggcttcatctctctgtttagatcatgttcctagctttctcctaagggtgtaagcacacaggagtggttggtcatggggccctgaggaataggagagtcagtgactgggaccccacactctatcaccttcagtctacaggcttcctttgaaatgtccgatgagtccccagagtctggatgaggaaggttaggagagagaggacacctcactttccacatgcacccctgcttgagagctggacttccttgtaacaggaggaaccagaggctcggagaggtcaagcttggcccagagccacacagctgggaaagtcatagagccaagctgtagagcaacgctctctgaagctcagcttttggctagatcacttgacctcgaaatccatgttgctgggttgggaactcagtcgctatattagtaatctggcattctcctcagttgcctgggggccgcgctgcccctggagggtctgcttcagctgacccaggaatccacacctttaccagctgactgcaaaagtccttggccaagcagtcgggggccctgaactgggatcaccttcctgtactcagcctcaaaaacagccagtgggacttgaaagtttccaaaggcctttgaagacaattcggagtctccacagataaggactttgaggccccaggggagggcgagtggcactttggtgccacacagctggaaagagtggtcacaggaacacagattttcctcagctgatgatgtaggaatcctgtagccatgttgctgagggctcagtgccagcttcctgagccgtggatcatagcgtgaactttatgcaggctacctttgcacagctgtgatctagtgaagtgtcaaaagtgagctgtcacattcagcaggtgacgtgtgttaaaaagtactcggaagccgggcgttggtggtgcacgcctttaatcccagcactcaggaggcggaggcaggcggatttctgagtttgaggacacagagagagtctgtctcaaaaaaacaaaacaaaacaaaaaaccaaaccaaaacaacaacaacaacaaaagtacttggagatagactgggtgccgtgtgctaaggatctgctattggatgctaacaacagcctggtctcaggtaaggaggctcaggtaacttgtcccaggtgacaaagccagcaagtggtagagctgagagtctcccaggctgcctgccagggctcatggtaagcggaggtgcccacttgcagatgcttgtgacagggcgtaggttttgactgctcagtttcaggaagatggaagggagcagtgtggtgacaacagtgtcatcatccagtgcaaatggaggacctgtcactgtgcttgggtctcactctgagccggcgtgggctgaaggtgcttcttagccatttccttgaccaagaacgccgggtggagagttgctgtgcacagctcctgcagtcgagaatccgcaagtacagaagcctgagagggggtgcaacaggcagctcttggtttccaaggaagggagctgagctgttgaaaaaacatggagtccttgtccagattcaccagcaagccggtggcagcaaccggctctggctttcctcacctacaaaactgggtcaaactggaggccaggtggtttgtcacatatgagttaaccccgagtcagagagggtgtaagaaagtttgccgcctgggccaggttcctcactgtacatgtcagtcacctctgcctgctccctcatgcccctgagcatgacaagtcagccatccaggattctgtgctgggacagctggggtggggtaaggtagggggtggggaagaacccagggcttctcgtgggcctgggtcccatctctgcactccacttgcagtgtttccatgggctcctcactacactctgagctggttcactgggctgcaggaagggctgcttgcagagagcagaagctggcggagccccgggttcctgcggctcctaagccaaagttaggacttctcttttcatgaaacctccagatagacttgatctagcaggatgcaaaccaggaccctcgagcttatatcaataaaggaaattggcttaaatgcaagcatatgggaatattttagctttgatttctcacacttgtttgaaagtgagccttgctgaccactgactacatggcagtcaatagccatggctgaggtgctgctggatcctcccccaaacacacacacacacacacacacacacacacacgcacgcacacacacacacgcacgcacacacacacacacacacgcacgcacgcacgcacgcacgcacgcacgcactagcacgagcggagtgcgcacacacgcccttacttcctgatgggctggtttatggacatgacagaatctaggggaaacaaactcaggcaaagctctagcactctgaaagtggggaggtgtagcggggtctgtggtcaattcagggaccttagttgctgcaagggtctgtctggaatgtcagaactatcattggatcaaactgaatctacagtggtcttcaggagcctgggtgtctaagacagactctggggtaaaaatgtttttgctccatgactcaaagcaaggtatataaagttcctgtgccccccttttctcatttgccaaacaagcaccgtgggtcactgatgtgagatgcatagtgccgagtgcccacagctactgctgtgcttcagtgctaagagtgcaatccaggtccccgtgcatgctggcgctcttccactgagccataccccagctggagaccaaaagggtgctcctgaggttgctggtgagagtatccgagactccaggtggttttcctggtagctgaggaagggtggccgaaacctctgattatcatcaccatttgatggctggggacgtgaggatggggtgtggggttgtgttttatgtctttaccttgagtgcctcccttaaaagtgcaacagtggccaagatacagaacaatggagtgaggggggatggcttctgattttctagatcataggtgtggtctgctctggtgtccttaggcagagattagcctgcagggcctggattctgtcagcagttattaaatcaaagtggtgacagagtgtctagcacgagccacctccttagaaggggcagcagggactgggctggggtggaggtgtgtgtctctctatggaaggagtcggtggctatctttggggaagatagtatggactagtcactaagttctcagtgccccagtatcagggaacactctgtcttgatcaccattaggtccttggggtcaagggacatgccaggggcactgaagacacagaagaatgtggcagggctatggagtgagtgtgcaagccctgtcctatcctggctgcgtagggaccttccttctcaggacactggagtttccatgagataagacttgggagctcctcagccctgcatccaaccatgatggacagacagacagcatagaagtgtcaggcattatggttttacacagttatttctgtctctagcccttcatacaggcttctgtatgatactggagtcttatggtaaagggttcagctatcctttcagaattttcccactaccttgtgataatggcttagaaaagagaggtannnnnnnnnnnnnnnnnnnngaaagtggggaggtgtagcggggtctgtggtcattcagggaccttagttgctgcaagggtctgtctggaatgtcagaactatcattggatcaaactgaatctacagtggtcttcaggagcctgggtgtctaagacagactctggggtaaaaatgtttttgctccatgactcaaagcaaggtatataaagttcctgtgccccccttttctcatttgccaaacaagcaccgtgggtcactgatgtgagatgcatagtgccgagtgcccacagctactgctgtgcttcagtgctaagagtgcaatccaggtccccgtgcatgctggcgctcttccactgagccataccccagctggagaccaaaagggtgctcccgaggttgctggtgagagtatccgagactccaggtggttttcctggtagctgaggaagggtggctgaaacctctgattatcatcaccatttgatggctggggacgtgaggatggggtgtgggttgtgttttatgtctttaccttgagtgcctcccttaaaagtgcaacagtggggctggtgagatggctcagtgggtaagagcacccgactgctcttccgaaggtcaggagttcaaatcccagcaaccacatggtggctcacaaccatccgtaacgagatctgactccctcttctggagtgtctgaggacagctacagtgtacttacaataaataaataaatctttaaaaaaaaaaaaaaaaaagtgcaacagtggccaagatacagaacaatggagtgagggggatggcttctgattttctagatcataggtgtggtctgctctggtgtccttaggcagagattagcctgcagggcctggattctgtcagcagttattaaatcaaagtggtgacagagtgtctagcacgagccacctccttagaaggggcagcagggactgggctggggtggaggtgtgtgtatgtgtatggaaggagtcggtggctatctttggggaagatagtatggactagtcactaagttctcagtgccccagtatcagggaacacactgtcttgatcaccattaggtccttggggtcaagggacatgccaggggcactgaagacacagaagaatgtggcagagctctggagtgagtgtgcaagccctgtcctatcctggctgcgtagggaccttccttctcaggacactggagtttccatgagataagacttgggagctcctcagccctgcatccaaccatgatggacagacagacagcatagaagtgtcaggcattatggttttacacagttatttctgtctctagcccttcatacagacttctgtatgatactggagtcttatggtaaagggttcagctatcctttcagaattttcccactaccttgtgataatggcttagaaaagagaggtacatggttccatctgaggtggggaccttatggggagccatcaaatgtcctacaagtacttatgtgcatgtatgtgcacaacataggagtatgtacatatgtgaggctgtgtacttgtacccatctgtgcctcagtggtctcacagctaaggcatcccagtgtggaacatgggacctgggcttcatgtcccctttcaccaggtgcctaggtgctattatttcagataattgcccagaaaccatgcaatatgcagtgtgccacaggaccagctatcatggtaacttgattggcctcagggtctcctcttgcttcagggagaagcaagcagagaagtcctggcctcagccccctgctgcatgggctggcttttgatgtccccctgtactacctgggtccagggaccagagacgggccagaggcatctgcctagacgtgtctcatatagtgagttcagcctggactaaagagtaagactcttaatctcaaaagagccagaaccaagccgggcagtggtggcgcacgcctttaatcccagcactcgggaggcagaggcaggcggatttctgagttcaaggccagcctggtatacagagtgagttccaggacagccagggctacacagagaaaccctgtctcaaaaaacaaaaaacaaacaaacaaacaaaaagagccagaaccagctggacctggtggggaaggcccatagtcagcagcattggggaaggtcaggagttcaaggtcatcctaggttgtatagcaggttccaggacagcctggtgtctcagcaacaatagcaactcctattcccattaaatagcaccactgtgggttccaggcccaacatggaggtgtggcatggtgcagcggcaagcatgaactctggatctcccaggccctggacgccctgcagtctgcctggctggggcttagtccttcacttctctgtcctttaacttcctggcttggaaatggagggaggcctggatcctgcctctcagggacaccgaaaagtccaagccaggctcttgtgtgcctggtgtgttggaactattcagccattgattgttgctaagggaccacatgggacttacctgaaaagcaatttaagaaacagaaaccaaagcccaggagtgtaacttcataatggtttcccgcctcctttaaatgactgttctaggtgggatctgcacatgtgctgctggagtcagacttgctcagtctcccttcccgccaaagaaaagttaacttctgagaggtcacttgacccgtaggtactcggccactggggctcctaaaatgaagcctttaaagagctgcctggggtattggtgttggacaaggccactatggggctgactgcccttagtggggcaggcacagcgtgagtgttacaggtcactgcatcagcccccacctcccctaaagtgctatttcctagattcctacggcatgagtgggaacagaagacagtaagggaaggacaggaggacatcaccttgcctcttcattcatgctctccatcccgttccccaggcttctgcacatgcttggctgggccaaaactacaatgcaaaccaaatctactaagccaactcaaatctcagccaaaagtcccaaacgtcactggtctgtttatcactcacacattgacagctgcatgccactgatcaggcagaggatgggtgtccacccgacctttgtggacatggtgcccaccctgctgaggcttgctttccacaggagtccatgaccaaaagttttctagcaagaatgcccagagctttaactttgttcaggattctagaaggttcttccatggtctttattctgaggacttaatgataagcagggctggtttggtgctggaacagaaagttgcaggctgctctggaggaaaaggccgttatgagtgggtcttcgtggtgggtaagcagttccctgaggcctgggaaggagcatgccctccgggcttcatatagccaggaccagaggtctgcaggccagggattctcagggtggatgcctgcacaggctcagctctaacagcaacccatcaggctggcagcagctggccctgccagcagctggtctgactgccaagatctctctttgattcacattttccacattgaaagatgttttgaaaaccttgaccttcaattcatcacatgtcccttattaaattgtaagtcacatccagccagttaatgaaaagacaatgggcgggtgacgcagtacaaggcatcttggcaggagctcaccaaagcgctctagccacagaagacctgacctagtgatacccctgttccagggcagacagcgtgtcacaactatgaagggctgggcttgagagagtggcaaggctgcagtaaggctggagaagcggggacatgctgaacattcagcagggcccaggcaggtagacgggaacccaacttaaaagaggcagagcccaccgggggaggtggggaggagtcacacgtttgactggaagagaagcaagtggtagatgtgtgagggggtcagtgtggcaggggcttcttagacgcgggcatgtagacaaatgtgagttggagggaagagatggcattgtgacattgtagtgtctgtccccagtgagtactgtgaggtgggagggcagtgagagatggaatagacagctgaggtggaccttcacacgctggtcacttggtgggagccacagaaggttctagaacagatgtcattctgaggaaggtaggagcagctgtgtggagaaacacgtaggtgcagaagaaagtagctgaaggcctggtgacatgggtaggcctagtttcaaagatggcagagggtgtgctctcccttctaggctgactgtccgtcaccttgcctcattcatggaggcggggcagagaactaagactgagttctagcttgcctccttggcctcactccactacctccacttaccaacggaagcagcggaagcagcgttctgcctccctcaggggtgtggcaagagtgaatgaaccactgcacatagtgttaggagagtactggatgtgcagacagctctaggtgagtgtcaccaagggccagagagcctacatggggaccccccagctggggaacttaaaagtattggagtctcccgtgggccagtagactttagggccatgttgacatatgtccatgtccattcacactctctgtgttgactcttgcactggtgagcaagggagcctgtggggcttcagtttgctcattgtgaaaggggatggaggccagtgcctggttcacggcactgttgcagagatgaagtggcctgcttgatgctggagaaggacttagcgatgggcatggctggggtcagtcctcattcacatccaggttgttgccacttccatagtagaagcatcatttcctgtccagtgctttcaggaagatgcctctcctctcttcctgtcacttccctgtagagactctggaccggagactcctctcctcccccagccccaatgagtcttgaagacttggccagacttgtgtgtagtagggaatggtcccagcctgggctccaccccttgctggccgtgggaagttgtgtcggtctgtcatcactgtggcactgccttctcatctgtaacaatgggctgataatccacacattgtgtgagggcaaagctgtgtggcacacatgaactactgcgtgtgccatctccggggccagaagcctcttgtagcatcctcttaggcagaagaggatcctggttcacagaagagtcgcaggttcaaggacagtatcccaggatcttgagcacagagtgggctggaggcatctcagctaagtattccagggtcgtggtatgtgacagtgtcaacccagcccagacgcaggaacagctgtccaccctggccagccagtgtgcacactggtcaaagtttgttatcttagcctttttaacaccctgcgaatatgggagcagcaatccctaccgtccaagggtcgaagctgttgcaggctaggcatgtggtgagaaagccctgacagggcatttgtcagtagcctgggggcatacccaggaagtctgtttgtggtcctcttctccatacctttccttatagcttcttaggctgcagggctgggaggcagtgtgtggcctacatagaagactctgcaccacaccagagaattagcatggcggaccctaagttcttctctctgccctgcatcccctctatacccctgctagggtcacagcggggccgatccctgtaaataccagtccgcttacatgtgcatttttcctctgtgatcttcctgttttgatgagacactgcctttggccgcacgggttccctaggggactgcggtcctgaggcccagccctagccagtcattcaggaattctgcttcctggcgccccacaccctgcacattccaccagggctagcgcctcctgctctgcgtgaatggggtctgccttccccattcccacggttcccatggccacttccttatcaccctctccagctgactgaaaaaggccacattccagggcaaaattagactcaccctccctttctgttttcctccagcgggcaggagagtttgctagagtagactggcgctggagcccacgggtacagggaacagacgtgctgcttggcgtgtcccctgaatctatcacttcgtttcttggatcatttgaggaatgcactgggcttctgctgtatgccaagaaaagccccagggactgggcttacaaacagtggggttgtacagtgtagcatgggtacgggccgacagctgctgggcttgggggttgagctgttttcatttgctccatattctagattcagctgatgcctccatgttgcttctgaggcgtcatttgatggcgtttcaaggagtctgcttgttcgtgccgtgctggggatggaacccagagcctttgcatgtgtgctctacggctgagctgcatctccagagggcagaatggggcttactttaagagccccccttctttctagccaaggcagcacagagccgcacctgagcgccgatgctatgttcttcaaatgccccatgcttagaaccacaggccaggtaaacctcggggcagaacttacccaatctgttagagccacaagaggtgacacccggcagcatctgacaaacccaggctgggaccttctaaaaactaccagtaaaaccaggggaggggacagactgcagcagtctgaagggtgcccttcaggggcctcctccactcaggaaatcccatgattcctggcttcactgtggagaagaatttcatgatgattcaacatgaagcagaattggagttcacgaggggggttttaatgttagtttttggcccaagtactaaggggaaatgaggtgtttgggaagagagtaagacaccagagagcctgggtgtgggcttctctgagggccacacgcctttgtctttacaatggacaggtacaggattatggtggatttaaaagataatatcttcaaagggtttgttatctgctaagaacccgagtgagatctctgggtagtcctgaagggcacctgacagggtcgcacttgagacggtgggtcacaggcagttggagatccccactgtcagcaatgttaatagtcctgcttaggagagtcacagatgatgtccagttcattaccattttaacaatatctctatatgggtaaattataaagtatctatctcatttacagtcatcttttacttattgtaggtctatcatccatccatcgatctatctatctatctatctatctatctatctatctatctacctatctatctactgtcaaccatctgtctagtctggcttctcagccacttagaggctccatggagacttcagagtcaggggccctttttcatttctcacatctctatgatttccttgtctttcctactgcagaaagttgaggaccagtcacaaacctggggggggggctccaacaactgaatgcagtgtggtacctgagcccagcagaaagacaagagagccaaaccctgagaaagttggcggcctagttgatgggatcatgtcaagtttcttagttttgagaatttcagttacatgagatgttagcatctcatccaggaagctggtgggaacctgcagtcatgtttatcctcggagatagaaaagtcagccaggcgtggtggcgcacgcnnnnnnnnnnnnnnnnnnnnctacggctgagctgcatctccagagggcagaatgggggttactttaagagccccccttctttctagccgaggcagcacagagccgcacctgagcgccgatgctatgttcttcaaatgccccatgcttagaaccacaggccaggtaaacctcggggcagaacttacccaatctgttagagccacaagaggtgacacctggcagcatctgacaaacccaggctgggaccttctaaaaactaccagtgaaaccaggggaggggacagactgcagcagtctgaagggtgcccttcagaggcctcctccactcaggaaatcccttgattcctggcttcactgcggagaagaatttcatgatgattcaacatgaagagaattggagttcacgaggggttttttttttttttttttttttttttttttaaagatttattttattattaatatatgtaagtacactgtagctgtcttcagacactccagaagagggagtcagatcttgttgcggatggttgtgagccaccatgtggttgctgggatttgaactctggaccttcggaagagcagtcgggtgctcttacccactgagccatctcaccagcccacgaggggggttttaatgttagtttttggcccaagtactaaggggaaatgaggtgtttgggaagagagtaagacaccagagagcctgggtgtgggcttctctgagggccacacgcctttgtctttacaatggacaggtacaggattatggtggatttaaaagataatatcttcaaagggtttgttatctgctaagaacccgagtgagatctctgggtagtcctgaagggcacctgacagggtcgcacttgagacggtgggtcacaggcagttggagatccccactgtcagcaatgttaatagtcctgcttaggagagtcacagatgatgtccagttcattaccattttaacaatatctctatatgggtaaattataaagtatctatctcatttacagtcatcttttacttattgtaggtctatcatccatacatccatccatccatccatccatccatccatctatctacctatctatctatctatctatctatctatctatctatctatctactgtcaaccatctgtctagtctggcttctcagccacttagaggctccatggagacttcagagtcaggggccctttttcatttctcacatctctatgatttccttgtctttcctactgcagaaagttgaggaccagtcacagacctggggggggggggctccaacaactgaatgcagtgtggtacctgagcccagcagaaagacaagagagccaaaccctgagaaagttggtggcctagttgatgggatcatgtcaagtttcttagttttgagaatttcagttacatgagatgttagcatctcatccaggaagctggtgggaacctgcagtcatgtttatcctctggagatagaaatagtcagccaggcgtggtggtgcacgcctttaatcccagcactcaggaggcagaggcaggcggatttctgaatttgaggccagcctcatctacaacatgagttccaggacagccagggctacacagagaaaccctgtctcgaaaaaccaaaaccaaaccaaaccaaaacaaaacaaaaagtctaaagtgcaaagtttatgctgaatttctttccatccataaaaagaagaaaagagaagagcaagaggagaaaatgtgaggggcctagtggcttgtcatcccagctattttggagctgaggcaagatgatcacaagttcaagacctgtctggtgcacttagggagagactatctctggaggagggggaggggcagcaggaggaggaggagggggagaggaagaggaggaggaagaggaggaagaagaggaggaagaggaggagaaaaggaaaagaaaaagaaaaagaaaaaagagggctggcagtctgtctccgtggtagagcttgttcgcaatgggccctctgaacctacaggctgtacattcacagattcagataaccatgagaaatactcagaaaatcatgtctgtctttactgtgtatagatttccctgtctggttcttgttcctgaacagtgctgtttggtatactcaacaacagtgtgttcttgggtaagtcactgagaagtgatttcaagtatatggaaggatgtataagttctctacctaccatatacattctatacaacacatttgcgtgtccctggagtttctgaggaaggaagtcctgaagctagtcctccaggatatctgggacaactgtacatgtttggagaaaggcttagtggaggatggcgttgggaaggtagacactttccaagtgtaaaattatctctgtgacaattctccccagcaggttagctggccttgttatctgagctagagtcagagcctggccccccggcagcaactgacaaccaagcttgaccaccattctcattggtctccgtggaggtcagtgtggccacattggaaaaaggaaccaataaggagacccagcagcctctgttgagggctcctgatgggaggtttaggtttaatcagaaggccagagtccccatcaaagtgtgccccactcttcttcctctgggctgcaggctctcctgctaggtggacaagttgggactctggaatgtctctctggctggcaccaggctccatgcagccttttcttctccagcatgaggttcctggggaagattccaattccttgagctatatggactcaatattccgatagccaaagagagggacacatgtgtctctttggaatgtattcactcttgccaggaatagcgtttcctaatgggggtctgggccgcccctcccgagagggggagtgtgccccttgctggtgtcactggctcccagctgggaaagggggcttgtcctatgatcctttccagtgtggcccacacagcagccactcttggcaccctcacagtgtttgctgcgtctgtcacacatccaccaccctatgcacacagcatattttacttgagtagtcttcgtttttttagaagctcaaatggatggattttcaaaggcaaacattgatgtcatccccacaagtggaaaacagtcctcaccagcgaatccccggcatccttaagtgagcggggagaaggcttgagcggggagaaggcttgagcggggattattgaggttgtgggttggaggtagctctgaggtagagtgcttgcctggtgtgtgtgaagtcttggattctaccccaagcactgttatattagattgttttcgaattattttttgttattttacgaggaatatgggcttatattttaaagttgcatcttcgggagctagggaaatggccttgtgggtaagagcatttgctacatggtgtgagggtctgagttcaaatacttggcactcacaggtaacttcagaactgggttgctagggctcagagactggaggatcattgaagctcgctggccactagcttgtctccaggtttagtgtgagaccctgtctcaggggagtaagatgaagagtaacagaacaagatacccagggtcttcctctgacctctgcaagcacctgtacacacctgtacacaccacatgtacatgatacacatctccaatacagaagtggactgctgggccaggtagcttgcatgagacgctgctccccctcccagcgactctccaccaaagtgagatgatcagatgttcaaaggtctgctgatgccaggtgagattttcttttaagattactgagacacctgaaagagaaatgggaagtatttgctgtcttttctgggtgtccacatgaccttaggcacaagcactggccagatccgccattggcacaacagacttcgatatcaggctggggacgccggtgctcatgtggcatggcctgcctcttccaggaactcgatgctggtagttcttagaggtccagcctgaagctacttccttctcctccacaatttcatagcatttcttaaaaagccaaaagttagatctgtgttcttctaagaagtatgggggttattttccaatgtggtattgttcttgcttaattctgagaactggattttggcatattgagtcaatgctgtctgagtgacagatgtgtgttagcacgtgtgtaatcctggcgtttgggaggcagagacaggctaatcacaagtgtaaagctagctggggctacataatgagactatctcaaaacaaacaaatcaaaacaaaacaaaacaccaaaccaaacagtaagccaaacatttaaacctcaatgtggcagggggtttttcccctctctcctgattataattcactaatttgatctctgacctcactaacttgatttctgatcccactaagtccttagaacatgtgtttgggaaagcctcctttcagagggttaaagttagcaccacattaacatggcccattaaaaataactacctgctgtgtgctgtgcacagtcctgtactctgcctcacttaatcccagacacactgtgtgtcaggccatcaggtctcagagaggaacatcattttgcccagcttacaaagcaactggtcagattctagaacctgggtcaagctgactcctgcccatgtcctttggcctcgggggacttcctccacacacctgctgtggctccttattcaggctcttcctataggcggtgtggtcagcatgtgtgaggggaagggtctaacaacaagatagtggagaaagaaaatctctaacataaccctaggccaggcaaaggagtcccagggctggctgatgattataaaagagagaattgtttccgaactttctcgctgtgttgttgtgttctatcctgtgtgtcacatgtgtgaagttacagtttgaatcccttttaccttcctgatctgtggccataacacaagtggctagctcaggaatccattctttgttgtagtcatagtgatattctttgtggtgttctaagttttaaatatatttgtgtgtgtgtgtgtatgtttccgatatatatcatatatatatttccaatacacacacacacacacacacacatatatgtatgtatgtgtgtgtatttgtgtatatatattggaaacataaaaccatgcagagagccgggcatagtggcacatacctttaattgggaggtaggggcaggtagatctctgaggccagcttggtatacagagtgagttccagtgagttctcagtgttacacagagaaatcttgtcttgaaaaccataagtaaataaattagataaataataaaataaaaaataagaataagaacacccagaaaataacatacactcatcttttctcttaaaagcagacctctcccgacatttgtctgtgcatttgtctgtcgatttctaccagaggccagcagagccagttcaggacccacgaccaacagggtgggttggctccttacttaggagtctttaacagattgttgagtgaatgcatttgcacacgccatgcacatggacaggcttggttatttgctctgtttcatccagttaacttttgtcaatgtgctaagacattcttggatctagtgcctcactcagctctgggctatcgaggggcaaagctgagaaggaaagcctgtccaggaagcagcaagactcgggcagaaggcagagagacccagaggcagggagggaggggggcaggcaggagtgacctgtagcctcaagaggatcctggattaccagggctccttggtttctgtctggtcctgaatccactgggaacacaacctgcacatatagggcctcatttcctgcctccttggatactggctcttgattaagttagtcctccaaaggactgggggtcaggacaccgtcttttggaatgtccacatattctggggaagcggaagaactcagtcatgggctcgcagtgtggtttgtgtactaacagagactttctcagagcagtccccttgcctctgccagctggagaaactgaggcactggacagtgaagcaagttcctcaaggtcacagctagcagatgctacattgtggtttctttaaaaaactaatagagagcagggcgcctttaatcccagcactcgggaggcagaggcaggtggatttctgagtttgaggccagccttgtctccaaagtgagttccaggacagccaggactatacagagaaaccctgtctcgaaaacaaaacaaaacaaaacaaaacaaaacaaaaaagtaatagaaatattatgagactatggttttgttttaaccccaggtgtgggatctggggctgctttagattgtccacagcagctgactgtgatttgcctcgtgctctagcagggacatggttttgccagtggcagacagtctgtgattgtgagacatttggaattctagggacttttcagagtgtataaatgctagttccctgagaggcaggctggattgttagttattgattggttggtttttggttgctgatggttgtgctttgttatatagtcatgacgcagaagaaagaagaaattaggtatcctggggtgagaacaaacttgatgcccctgatcagcagaaggtagtctaactataacattgcctcttttccgctctagtgttaggggggctgaaagggtgaagaagggcggaagaaagaagaacccacagagcagcagaagtcagctaccctgccctgtgctcactctgggcatttccacgtttcatcctctttcccatgaatcagggtcttacgcttccatctttcagatgaagaaccctggcggttcagagacaagtgaagccactcagctaaggcccaggggatggaacctgggcctcgtgggcagtagggattaaaaaaacaggtacctggccgtgtccagacaatggagtagtatttggtcctgaaaagcagtgagctgtaaaggtgggagaagacatggagggccctcaggacatgtcactgagtgtaggaagctggtctacaaaagcgccagagccattgaacaacattccagacgagttagggcagtgtcactacccatctgtccccagctctccaggcttatctcaagagaggagccacctctgggtcaataacacaaggaagaaatttaatttttttgtagagattcatcttatccatgacttcttagagacaacatttttctaaacagaaatgagtgtccaagccttgacgaagccatcggctcctgccaccttacacacacaagctgcccccagttgtggacccagagctggccaagcgatctggcacagagagtgcctaggcccactgagtgctcatggcccacctctggcccagcctgcctctcccatgaatgagtaatgcctgagacttcaacatgctggctgcccgagctccagttgaacttggctcttgagcaaaatgtacttttccaaaagacattgattcaactccacatgtattttgcaatgcctggcaggagggaggcccgcctctcccctgcccccaatgccagcacatgctgtcctggggagtggggcccacagaacacagtataatctccctcctccacccatctcccaagccttcccctggcatagccctattccttatgccagccatcacctgaagtatctgccgcctgcctctctccaggccctgacatagcacatactgctgaactaggtttcagatgacaccacaaaactggcttggaaggagaactggccaagacaagcctcaggctgtcctgacttagcctatcccaccggggaagcctgtcctgtagagccatggaaccaacgatgtgggtgcaggaagagcaggttggtgacgtcccaagaaccaacatgcacaccgtggacttgttctcttcaaagcacgttacttagagtgggagttggggtttgaaacagcttcacacatgggaccaaaggtctatgaccattctacatcctcagcctctaaaaagaccatgttcttaagagaacctacagcagtttagggttacagcaaaactgagtggcgggtagtgagttctcatgtgtgcctgctgcatcagcatccccagacggatgtcacccaaaggccatggttcacttgcatcccatgtccccggacgaaccacagatggcactccagtttctgtgactttgccatttggggcagctttctggacctcttatcgacctcccccctcccccaccacctttaaaatgggtctgagtaggcatgaccatgcacagctataatcccagcactagggaagctcagccaggaggattgagagttcaaggccagcctgggcatagagtgaatttgagggcagtgtagtgagttctgcttcaaaaacaaaaataaataatccacaaacgcaggagcgcttgcatcgaatccgcctcagtgaatatctggaaggtgtgcctcacgctcccatgcttgtgtccttggcagacattactaatccatctcagcatgcacacaccaggtcagggctcagcctcagctgcagggcttctagacctgtagacccgatccctttcatggaaacttccctggactccaagtccccattgagctctgcggctttcactcaagcctctgctctcctactgcctacagtgcagtgctccctgttctggtataagtgtgtatattgtcaagattcaaggctgaggtcacaagctgattggctgtcctcaagccaaatctgatgcatagatatttgctcagcagttctttttattctttaaaaacagtagttggccaactgttttttaaaaatagtagtgccacataagacctccaggtctctgggtttcccagatctgacaattctagggcctctccagtcacttcagggcctgcctggcccatttctccatgaccaggacctctggagccttattctatatgctctactttggagacgtgaggtgtggttggcttgatgtttctagagggaagattactctcctctctaaacgcttctctggggaattagcactaggcttctggtttcccgtatggttttcttcagagccagagccaggtgagccggaagctgtggaggtaagtgcaggctgtagtcattggcctgcttacattgatgctatctgtgactgtcactgccagcagggccggaaactgccaggctccaacactcagagctctgtacgttcccaggcacatgtggctcagtaggtcgttagttgcttcaagatgatattcctacttcaagactgctggggggccaggtgtgtgtgtgtgtgtgtgtgtgtgtgtgtgtgtgtgtgtgtgtgtgctggagaggtggcacagcagttaagagcactgactgcccttccagaggtcctgagttcaattcccagcaaccacatggtggctcacaaccatctgtaatggaatcggatgccttcttctgggtgtctgaagacagctacagtccatagctttgaggatgagataccaccaccagtttaagtaagacaacataaggctatgctgttcattcctgaacacaatacacatgggtttaatgactacatagtgaaggtgatgacagggctggggctgcatcagaagggacaggcgggtcagctggcttcagctgcaggaggaatgtgtgagctgagttttgaagaactaccttggacattagtctgttcctcccgttccacctgagtctgcctccctgcattgcaggaaccttccaggtgtgtgctggccactgggcctttggtcttgctgtccttgctgcctagaatgttctccttagatatgcacttggctgttggcctgtgtaatccgggtctctattatttgactccttgtcagacttagcaggcacctctctcctcactcctgcactgtgtcctttttcttcaaacgcttaccagtgctgacgtgtgttcatatctgattgttgtctttctcaccagagctcagatgactcgaaggcaggaaggtgacatcgctgtattcccagcacccagccctgtgccgggtccatagcagctactcagtaatgtggaagaaaggcagataggagagagagagagcgcagatggggtgcagagggcacagccagccatgtagaaaggcctgagggtcttccagagacaagagtataggtggcaccatgggacagagagaagggcagaccaaccaggcctcctgagacacagcctagctatcttcattttctcacagataaccagcctgtcccaggaagtggacattgctagccaccctcataggaaagagctctccagaaccggcagccaggcctgtgcagcccacttccttccttccttccttccttccttccttctctgggccccaccacagaggattgtgagaagtctcctcacagtaatgtgatgggcaaatttttcaagttcacagtttcctgccaggccccacagtcaaccatcccagctgtgaaggctgaccccagctcactgagtgaccgtgagcctttccaggaactgccctgtgcccgtggctcctcccactcttttctccagacttgtttcttcttgtctttctagaatcaggatctccatctgagtgtcttcttctctgggttttctaagccttactcttattagaaatagggctaagtctgtttttttttgtgccttgaattgccatctagttttgaagatcagatgaggcaatatgagttaagactcaagctcagtagacgtcattcacttccaggttaaaaccttcatctggtctttttatccagacccagccagactcgcccttcagttacttcccaagatcacagaatgctgtccaaaggttttctcagcaacactgagcccagtgacagacccaaaggacgtgcagactccactcaagggcaccttctgaagctattcctacaggctaccctccccagtgccctcctgagtatgagaaatactatccccaggccccaccatccagcccctgtttgttggttttaaacctgttggaagcccgcccctggcaggaagccacaagcatgagaatctagtccaggaatagcgctcgctgctcagcatttaaatgctgctgtatttttaccccatgatgggtcacttttgaaagccctcgctcatgttctctccctctaagaatacatttccatttatagcgtctgtccagggggtgtggggctcaggagagcatcctgtttcacttcaggggattcctgttcaccagcaggaaacctgaatccaggccaagccccaggtgtctttctacttccagggtctgagctaatctgactgttacaggctgggagacaggtgggggttcgggccgcttgccagctctgtactgcctgggtctccaggcagtacagcattgtggttctgccgctctggggtactctttctccttcattcacccaccaaatgctcacagctttctgttagcacaggttctgtaagggtacaggaggaccatgctgagcaggggcagtgaaggccctggaggggtgaaaacagttagggtgtggttgggaaaaattatcgctttggttcctcgtcaggctccagtccccattcagattctgtgagcctagacaagtgatttggcttctgtgaacctcctgcatttgttaatggtgttccctgggtggtgggcaggattaagcaagatagaaacaatcaggtgtctaagtagtagtacctggcccaggaggtgggagtgtgtgtgtgtgtgtgtgtgtgtaccctaggcccctcccatatccgactgttgactagggtaactcaggtgggtttaggctgaaggtcttatgaaggtgggtgtctgttgttctcagaaatgggtgtgtggtatctcaaatgcctgagcccctcctgaacagcacttagtgaccctcagcccaccttgcagtcaagcccagcatctgagaatctgatggtttcctggaagattctgagggagtgtgtatggaccccacttggaggtgtgccacccctccacccaccttgcacttgtctctcgggcctctgtggggtgcctgaggatctgggtctcacagtgtagcccagtggtggagtcaggcagtacacatgtaactgcaagcagagagggaagaaaagagtggagaggagtgacacagagcggtggctgccgtcccggaaggtgatgttggaacgcaggcctaggtgagagagtgagccatgctaccgcacaccccagatacaggaagttttgtttacagaaggttggtattggttcagaaatattgattggaaaactgtagccgtgattcgtgttttaaacaagtcccaagtagcataatgaatctgtcaccctaaagtctgagtgtccctctgtctagagcattcacctgtgtactgacagcccactatcacttagtggtcaccctagtcatctgactcagtgtcgtggtatcacggggtctgttgcagttaaccattatatttttaataatggcactaaaactcatgagcagtgacagtataatgttataacattctgttcattgctgctggcgtcttcctgtggctgctttataaattcaatttctcagagctatgcttaggaaagggtacctggtttcagggactcacagggtgtcctgtgggcagggagactgcagagggtggggtgggggtggggaaacacgtgcccaagttgtcccactgatgcacggaagtaagaagacttcttacttctgtatcttttatgttttatctgtcaagagaacccaagtggaagtggctgaatatgttttgtttttctaatgtaacataaggactggagatgttagcagttgtgggttttgctccagtagcccaaggatgccagcgactttgtctctgctgcctcagccctgggtgtcacatccacatctaagatgggagggtagcaatcaggatagtgtagttagagcaaggaacacctggccttttgagtctataatctaaagttcacagtcctacaatacttcatagcaaatgtcattggctgggctgctggagacatggcccagtgtagcattaaggtgcctgtcaggcaagcctgtggtcctgagtttgaatccccagcatccattgaaaaactgggtgtagcagcatgtgtctacaacactagccctggggtcaggataaaactaagagaatccctggggcaccctggctgaccttggtagcctaagagaacccctgggacaccctggctggccttggtagctgaggagatgagcaccaagctcaggttgagctgtatctcaaaaaattaaggtggtgagggatcaggaaatgtacttgccaccgtctttttccccatcatctcttgatttatgatggagatcttgtcacttgttctgtagagttccccatgatccagaggtggttttctaagtcctctaactggtaagctcaggagccttgggtgggtccaaggttggttctcttaccaagaagtttttctggtagtgctgtgcttttgcgctggtgtccctgagacttgcagtgatggcacagtggcctggcttgtctgtctaaggttcccatgctccatgggtatcccctggacaggagagcttgtgcaaggtcaatcttctgatcctcataggatctgcatttactcttggaaatccttctggaagacagaactttgccccgtcaactgttccatgacctagaaatagatattgtaaaagattcggaagaagtgttgtttgtctagcaggtggtctaccattgtttgttcagcatggctgtggtttggaaggcctggattatattacgttatttgatacattataatcatgaccgttattcaatttattggcctgaacatgacacatagttatgtgtcacctattattgctgtgtgcataccattatgtcatcctagcccagaatgtgtccatcactcctgagagcttccttatatccccacctgcagtgatcttctgcgacattttccagaatctaatatgaatgaaattaccccatctgaacccagttaactttacccagcctccatgcacctacccacacactatcccacattgtggatggtccacacttgatgtgcatggacatctaggtcgttttcctctttgaccaacataaggaaagcttcctgggtgttcctgactgttcctgagtgttccagagtgttcatgtgcacacccctgtgtatgtgtagttttgcagttctcctggcacacgcctagcatggcgtggctgggtcctacagtgaatgcgagctgtggttttactacagtttaactgttcatggcttacgaggctcagctcttcggcatgcaggtgtcaggactggcaggtgactaaggccctccacttagcaatcagccagtgctttcctgcagcatggatcagttcttctgtgactccaggaagtgggtcttgaggctcaggctgcttttgtgggaattagttaaggtcttaagggactgtattccctaaaacagagactgcatgatcgtaaaggaacttgacccctttctgtctgtctctctcacacacgtgcttcttctgtgcatacctggaaacttctccttgctatgtctctactgtgattcaatctagcacaaggtccgcccgccagcagtggatcagttgtggccacaatgtcatgaatggaattctacaccccaataaacctcttttcataaattacccagtacttcattcagtacagcaacagacagtagactaaaacagcggacttttaactttttaagaccttgctgaattcttctcagatggccacacagttttatgttctccatggcaacacacgagagttccaactgcttgattggtccatagttccagctctcctgataggcatagtgacagctcaccatggtaccagtttgggttctcccaagtgactttgatgctagctagcatcccttcaggtggactttgatgtcagtaaatctttgaggaagtatcagatcaaaccctttgcccaatcacacagtgtagggctttcagttaccgaggtttgagagttctttagcctggacttgtcttttatcagacatgtgattgacatggggtgtgtgtgtgtgtgtgtgtgtgttgttgtgtgtgtgtggtgtatttttccattctctgtgttgtatgtgttcttttaaaacacatctcttcttcagagaggagaagtttttttgttttgatgctgcctgattcatcagctcgttcgttcgtggatgtgctgatgcgagtgtgctctatggtgtctcatttgaaaagagctccacccagtcttaaatcacaaagatttgcttacagctatccagggctatgtatgtaaacacccagggagagttatttataatggccgaaacagggaaacaaccccgataggtgttcatggacacagacatatgtacagaacatccatgaatccggtactccttagaccaaagggatgcggggctgacaggtgccaaggcagcatgggtcagatagtgtgagtctgtccccggcagggctggccatgtcttctagaagaaaatgagcagatctttgtgagcctcaggacgtccttcctagagtcacagaagaactgatccactctgcagaactggaggttttgtttttaaggcaagactccattttgcccccctttttagaactggatctttgcctgttctaggacctttacctgtcagtgtgagtcttagaaccatcctgtcactgtctgtaaacttggcttgtggtggtttgggttggaagtgaattaagcacagagatcagttagggaggaagtgacctttgctaacactgacccattgccttagtgtgtacatccttcttagtctttaacacccctgcgtgcgtgtgcacgcgcacacacacgccttacacttcagtcaggtttgtcctgaatttttaacatttctcttagaactcgtgggcgtgatctctcaggacttatgggcgtggtctcttagaacgcatgggcgtggtctccggactcgtgggcgtggtctctcaggacttgtgggtgtggtcatctgtttacacttcattctcaccttaagtataaattgccatcagcgttctccactgtgcacccgactcccacaccacacagccctccttggctgcttccttttgagctttaggaggatcctggtgttcctgagagtccctgtgccccttgactgtgccaccctccacgttatggctgctctctagcctgggctctgtccctctcttttgccctgggggtttggccttgcttcagacattcactactgcagtacggtaagcaggcttctgctcgtaccatttcacatttcagcctcaaaaatactcattaacgggtgaggccttgcaagacccaaggaagagtccaggatgaagcaaacctggcccagcatagcctgctgggaggcttgtagggagctgtgtggctgccacagcaacacctcttcctcttcagccacacttggtatttgtgggaagggaggaggagaaaggccgggactcggtgtcacaaagggagttctgggactggagaagtcatgtgtgggatgatggggcagaagtggaggctgctaaagctggtggtcttgcagaggctggagggcttcatgtgggtaccaggtgtcatgacaatagctcagagactgggctggagggagaaaccatatccgtcttagggaccacacagcgacttctgctggacatcataccaaaccttcctctgccctcagcctgtcccctcctccaggcaggtgtgcggcagcccaggtagaaggcagatgtcctgaggcaaactgagctcaaattctagccctacatcagggacgagatggaaagagacacatgacctgacacatagggttaggaaatgatgaaatagtgaggcaaagtctgagcctggagcacaagtgagccctgatcacaggggaggtgggggagggggagagggaggggtgggggaggggccagcaccattgtgatgattcttatcatcgctgcttctcattcagcctgggctgtctcctgccaggctgtgtcccatccagtggacacgatggtaggaatgcatattaccacgtagaatgtcccttcagggttcctgtagttacagcggttccaaggctcattctcaccatgcccctcaggcctaggcctgcccatttacctgtgtgtgcatcgtgttcacacatccctgcctcactgatgctctgcaaggtgaaggaatgactaagtgtgtatgttcggcctcactccctggccccacgccaagggctttgccaggccagtcgacagggctgaccaggccaaaggtccagctaagtgttttaacagctattttggggaacaaatgacccactacccaatgacctgctcctcaatagatgtcatataatttcattaagctttggaaacaatgacatcctgtcttggagccacccacatccagggaagcacagagctacagagatttaactgcaagagcagggagaagcgaggcccagggcgtgcagttaaatagctcagctaaggcattgcactgtggaagggagtcacagatgaagtcagtgagcccttgcagcaagcgcttcccgccggggtggagaagtcgcacgggcactcgtgtgtgtgtgtgtgtgtgtgtgtgtgtgtgtgtgtgtgtgtgtgttttgagtcaggctgtggccccctccctcaggctggaggtggactgcagtctgaatttctgtgagtaaatcttcttcccagtgctgatgttaacatatgttcccacggcaccatttccttcttagcaccgagggaggccttgcacagtgcaccgtaaaacaaatggcacgcatatgtaaccgtgccttcatggcaaggcggaaggcagacccaggctgtttgaccctcttcctgtaggtttctttgctcagtttttccacataaactttgccttttccgatacagagtgagaaagaccaaaaaggctacctaattccaggatcatggtgtctgtgggaccgacagggccatagctgtgagttcactagcaagagcagatgccctgaagcctctagaggaggacacagggtgggtggggcatgagcccgtttcttgctgttctattctgcaaagaacaggcgtttttggccacaggcctgcggacagtggttgtagccattctccctgctggagctgtctctgcagctggaaagacagtggcatctctggcctccgcacactaggtgattccctgggaaacacagcggcacctttgttcctcacagatcccctggcgcgcagcttctcaaagacacagaagctgctggtccttattgtcagtttgatgggatttggcctcgccatggaaatacacacatctgcgtgtgtctttgaagatgcttccaggaaggtgtaactgagcagggaagactcaaccctgaatgtgggcagacagcaccatccagaaggaccagagatcccaaactgaataacaaagagctgaatgccaacgtttatctcttcctgcctcttacacgatagcttccttacagaggacccaggatttcgggtgtgtgctaccatgccaggccctgttttaaatgcttaccctgggtaggctactcttcttggggggcctctggtctctcttctaatttgagaggtaacatggggtaactgcaggacaggacgtttctagagctgagagtggtgacaggtgtttggggctctctcagcaggtggtcacagtcctgtctgcccatctctctacccactccaggtcttgctcccatcccattggcttctgcacccaggctgggcttccttcagttcaggttggccttttgctttaatatcatgttattttgccttatttgagaaaaaaaaaattcctcaaacctctatcaaatgacgaccgtgtgtgtcaccttggctgccactgaccgctgtggctgcctatcgtgtttcagggccttggttgatttaattttagtgttgttttattttgttgttgtttggctggttgggtttttgtttgttttgttggcttgttttgttgtatgtgtgtgtatatatgtgtgtgtgtgtgtgtgtgtgtgtgtgtgtgtgcacgtgcatgcacatgtgtgttcactctcgtgggtgtctgagaaggccagaagttggcattggtcaccttctcaatctgttacctcccctctttcatgtgtttgtgtgctggtgtgtgtgggtatgtatgcatggccatgctggagggtatacatgtgtgtgtgtgtgtgtgtgtgcatggagaagcccgaggttgatgttgggtatcttcctccatcagccttctgtctgtctcttttgaagcagaatctagagactggaatgagaggtgaaccaccacgcccccaggatttatgtgggttctggggatttggtcctttgggttgtgtggtaagcactttaactgctgagccatctccacagcccaagcttattttgtgagctctctcattgaaactagaactcttttggctacactggtgaaccagcatcaggaaccacctgcctccgttcgcaagggctagggtccaggtataaacgagcttggcttctatgtgcgtgctgggtttgctggagtgctgggtggctggtaccctgagccatctccccaggccccactgttttctttgctgggacagggttttgctctgtagcccaagttgacctggaatgtatgctcctcctgccatagcctccaatgtagactaggtgtccagcctacaaatgctgaccttcctctgggctcccgggcagccttgggcctcatccttttgatggaaagtctcatgtagccacagacttgctatgtagcagaggatgaccttgaatttcggatcctccagcctgcatcacacacttgatatatacggtgctgggtcagggagggaaagccaaaggctttgcccacagtttgttgttgttttgagactgggccgctctgtggccctggctgtcctgaaactcactctgtagaccaggatggcctcgaactcacagaggtcccatcagcctctgcctcccaagtgctgggattacagacatgcaccattgcgtccggtgccagtcctcattcttgtgttggtctgttcattggctgaaaggctaagactaagaaactcccaggtgagactcgggcaggaaatgaacctactcttcacctttctctgtggcggctgagcagtgacagatcgtgaacctttcttctgaagtagaatcagtgagaatgcgaaaggcatcggatccctctgacgtccttcctttctgacctccatctgcaaaatgagagcagacctaactccggccggtgcggagagtcagatgggagcacaggtaaacctcagtacataggcagcagcaaacatcctgtttctctcctgtattctttaccctttcctccacattctctgaggcagaatggctaagactgatcgcatcaccactgcgaggacctgactaatccgagccagagaggatgcacagctcacttcctcatctgtcacatgcctgggcttctcactagcctgctggtgggccagtttcccagggacagtcactcctgactcacttgttttgtggttacctctgaaaccaggctccttgtctgctctctctttaccccattaccactctccaatttgggtctgatgtgtgggaatagatctctgtcacttgtcacaggtggcctctgctgagggcagggaccatatctgccttggccagttcctctttcccagccttctagaacactgctgcatatgatgcctgtttactgtgtatttgctgaacaaatgatggatttctgaagtttctcttgcctaccgtgcagcatccttgggaaagtaaatgatttaagccttgagaccttggtctggcccccagggtgtggggtggggagaagatgatggcttggagactccactccaggctctgcttcccaggagctcagtgacatagggatttcccaagagagtgggacaccagtagtcagagaggtgggtactcacaacaaagctaagtgtgtatggtaaaagggaccaacctgggctggaaggggccgttcagcatcacgatttctagaacttggcttcctgtgctttggtctgggtctcacctccctgttacagcttaattggacatctccctgtccctggtcccccaacaggccataaaatgtggcttgccccacagcacacagcaagcttggtacctctaattcgggtgcccacggggaccaagcttcttcccaaaacaacttttgagtggcagcttcatttgaatttttttccatccgaattttaaaaataatctctattcattgtgaaataattttatacttatccccaaattgcaaaaatagcagagttctcatatgccctttacccaagtgtccccaaaggtcagcatcttacatcatgtcctggactgggtctctaatgtccccagaggccctgtgcttaagggcgtggtctccagcacagcagtgttaaagcagattggatgagggctccagcatcatccgtggactcaaccactaatggcttcagagctcaaagcttttgggatgaaatgggaggtttaagagctggagctgagcaggaggaagcaagtcactgggggttgtcctggaagggaatcttgtccctggtcccctgccctctgtctctctgtctgtctgatgaccaccttcctctgccacctgctcccatcactgaggtgagatgccctactgcaccctaggacctaagcagcagaagcagccagacagactgagacctgtgaagccaaaacagacctctttcttctgtgaagatggtcttctttggtaatttgttaccgccgtggaaagctgtcccacataaccataatgccaccatcagaacacaaacagtgacattatgtggtgctatcagcgacgtcacagggcttgctcagtgtcatttccagcgtaggaaatctatcgtgatcccacaccaagttcagttatcatgtctcataagtctcctctatttgggacagtgcccaggttacttttataaccttccaagtggaagcctcccatggggactctgtaccaagtccctcacgggaaggtttttcttacttgtcagtagtagccctgcatttatagacaaggaaacggaggccactagaagtaaaaacacacatggcaaggaagagcatttaagatttaaaccacagaaatccagattccagagtcctaacccctacctgactgagaacaagacagggtgagaattcaatttgattccaaagccccgcaatcccccatcatattccaggacttccctggtcctggtgatgtgtttaggagagaaaagctggggtggacaaccagaagcagagccagccttacctccagctgaccctaccttatcctgcaggcagaagctggcagggaagacagggacagtggaccaggatggggaggtggaggcaggaaaagggataaagagatgacacagagtgagaaagccatgtcataatataatggtgtcaaagagacatagagcctcccagtggctccctagacccaaatgttacctcagttcacggtgctgttactgggcagtgcctaccgcctatcagcctgagttagggacaaggcctcgcctttgcctggcagttacattctggcagaagcagggcccaccaagaaacatgcacatgtataaatatatgagtgtgtgaaataatgggtaatgagctggggtcctcgctgagacatgatgggatgtagcagagggatgtataggtgggctggctagatttatgtcaatgtgacacaaactgtggtcatctaggaggagggaaccaaaccttaattgagaagatgcctctataaggtcagactgtgggtcagcctgtagagcattttcttagttagtgattgatgggacagggcccagcccattgtgtatgataccatccctgtgtggggggttctgggttctataagagagcaagctgagcaagccatgtagaacaagccagtaagcagcacctctccatggtctctgcatcagcttctgcctctaggttcctgccctgcttgagttcctgtcctgacgtctttggtgatgaacagtaatgtagaagtgtaagccaaacaaacccttttctccctaatgtactttttggctgtggtgttttgtcacagcaacagaaaccctaagacagtaggatccttgtaaggcctctcagaggaggctggaaaggactctgctaagagctgtggttgctgacccaggtggcatgctgccagcaccccgtctctgcctgtaccctacacctgtctaatccccctgtttcttcttcgcaggtttgacatctacaggaaggtgcccaaggacctcacacagccgacatatactggtgccattagtgagtaactgcccttctcaccattaacccaaccctctgcctagacctcaaatatccatgctcccactctctgcagatctctggagaaaggaggaaagaaggaaaggcagatgggagaggagacatgcctagcatcccacaagccctacatctctctccatgaagcatctctatccttgctatataaccctgcaaggtagagtggccagctgtaactatacagccagggcagccagccataactagaaggatgcagaaaaataccagtgcagggtcaggatccctgaccttagagtctaaaactaagtctcctagatccagaactctctgagaggatctagcatgcactgtaagtggaaagtccacccctggccctgtgtgatgagcggctttgaagatgtgatagtacctccaggctgtaaggataagtgcgccagaaacaggagccacccaaaatctaaataaagaccagtgagatgactcaacatttgctgtgcatgactgatggcctgagttagagcctcagaacccatggtggaaaggcgtgcgcgcacacacgcgcgcacacaacacacacacacacacacacacacacacacacacacacacacacacactcatcatcatcaataatagcagtatattaaatacaaaaattttaaaagtagccaggtagtggtggcctatgacttaaatctctttaatccagcatttgggaggcagaggcaggtggatttctgagttcgaggccagcctggtctacagagtgagttccagggcatccagggctacacagagaaaccctgtccaaaacaaacaaacaaacaaacaaacaaacaaacaaacagacagacagacaacaacaagcgaacaaaaaaaagtccaagcaagcagatccgaggtatgggagggaggcatgctttaccttcctgcttttgaaatgatttgaattgttaataattttagccactaaaagaaatcacaaactcactctaacttagttcaattagaggaactaggacatctcagaaaagtggccatttgcaaccccaggcaaggaagagagtttcgcgtcatgtcagcaggacaaaaggacccaaggactcaaactggagcatgactctggtggactagaacccaaagaattaggggaaaggcctttgagcctgtcataaatgaactggggaggagacgaactcactcaagaactctggtgaccctgtgaatacccctccctccctctccctcaagtgtgaggcggctgtagcaactcacttccacagaaaagagattagaagtgtaagatggtagctttcctgtagggaaacctgcagatggcagctcggctgtgggagggaagttggcaccacctcgattggtcgagtggatgaatgaacgcctgatgtaagatgtgccttgccactgagggatctttcccactaagttaccaccctggcgaatgtgacagagcagcagggtcccagcctgggaggtcttctgccagatacctggcctgtatgctgctagaggagcaaagctgaggggagcggagggaagagggaagggtaaattacagaagggctcaggaggaggaaactcagggtaggagccagaatttgttcctgcctagaaacagcctttctggaagctggtgaaacctgtggccgagttaggagcatgcaacagtgtggatccctccacactgacaaagggtgaccgagtaccatggttacgtcagatgtgaacagggcatccaggagaagctgtgcaggcactgtcctggctttgcactgattgctgttccacaacagaaaacacccctcaccccttccccaaatatttagaacaaaccaaagtcaccagcaaggaagtgggtaggctttggcttcacacctcagatgcttggggaagggaagtgactcatctaaaatgtcactgcttacaggaggggcagttgggattaggtcttggatgccccctgcatgcttggtatggggcagagagcctcacaactggtccagccttgctgtgtgaatggaggccaggctgtcagcctggagtctacattctcaggtagattggtgacctttggggatccctgcaactccagctgtctctaacgctctttccagctgggtttcttaaagcagcaggcaccttctcccgttgtgaggaaaagatggctcttcctgggtatttgcaggctttcctgtgaggaagaaatggcttcatcctcttggttagcgcctatgtgtcctggggcaagtccctccacccccagccccaggaaaaaagactttcttagtctatgagaaacgtggccccctccgtgccaccacatagcagtcccccctccctgcagatctctctccagtcgttacctaacctgttgaacaatcaggtattccaggaggtactgcacattgtcctgctcagggaccagctgtgccatgcccggctcccttgtctctgttgctggacacacctctcccacctccaccaacagctctgccttctatccagctatctcctgtggcatcatgggtggccagcctgattctagcctattgtcacacaaatgtccttgtcatgtttttgaatcttctgtagtgtcactatgaggtagctctccggggcttagggacactgagtcaaaggggacgtgcatttgtcactgtttagaaaattctgcctggaatgcagccctcaggaatgtggtttgatgagcttttccttacatgaggggaagatctgaggcatgagaagccagcccttagctaccatttagtacacaaatatttattaagctggacctagggccagaccctgtgccaagccgggaccgtgctgatgaatgggcttcggtctttgtccttgaggctcaggcagccaagccaggcaggccaattcaggcctgcgccattgcattatgctgtgggatggttgctattaatagctgaaggagacagcgaaattctggggcttgaacgtcagcctatggattttgtttcctgccctacaaggctctttcgacctcagagggactccttgactttctcctgggatataagggtctcaagcttgactccttcaacttggcaacacctggcttctactagcaagcctctgctggggtcacattccaacttcccagggcctgagtctggagtcagagagcctccaagccttgcccaaacatggactgaaagccttcatccagcctttgagagctgaaggtcttgcttggaatacttcctccctgctttcatggtttctcactctttcagttattcaataaatattttttttctgtgccttctctgagccagcaatgttaggccctgaggccacagtggtaccaagacctcacctctggttcctctgtctgagacaggagtcaggtgcacccaccataagtacgggtggggacagggccattggaccccactgagttatcctgtttacctgctgggttacccgggctttgtgccaagccttgcggagggaagcacacagatctcagagaaaggcctccccaatctcattcccctactgcagagtgggtagttaggactttggggtgtatctgcaggtgtgaagcagtaacagcagccagaagactgtcatttattctaaagtcagcagcaatgagcctcagaaaacctcctgtgccgtacactcactgccgcgtccgctggggctggtgtggacagaatggcactgaaatgtgggtcctgggtggcactggacagaaaggcacaaggtctgactgcaggaggcttcgcctgctgcaggttcttccccaagaggcagtaactaccagtgtaggcaggagagcaggagccaggggctggcttggtatctgagcttcccccagcttcatcccccagctggaaaggatatttgagcttaatctccatgccgtggacagtacagaccaaggccactgtctgggaccaaactgttaactgttgctgagtatttgaagcatggctgaaagggggtatctgtcatgctgttattaatttagaacaaaaagggccttaaagtatgtatatctgcatatatatatatatatatacatatatatatatgtatatgtatatacactttttcttctgttttgactttgagtgagagtcttggctagcctggaacttgctgtgtagtctaggctaggcttaaaattcggccagtccttcccacctctgctcttgaattctaggcttatagatgtggccactaggctggccaataaatacttgtggtgtgtgtgtgtgtgtgtgtgtgtgtgtgtgtgtgtgtgtgtataatatagtacttatactatattatgtaattattaatacatgatgtttaatagttacatgtgcttatatgcccagctgaaactttttcttgtttataatatgcacacattctctatttctccccaaagtaaagcctctaaatgccatctctatacagcttcatcaacgtggggcagaggttatgagtattccagtccccatctctgtagctacagactcatcaggcagtttgggggtatcccatcttacccttgcagcccaggttctcaggagtctttctaggggcttaaccatagaggatagggggggtcccagttccttgtcgctcagcctgcgtttctaccccagagccaccatcaggctggcaccatggtgtcatggtggggtagtttgttaatgtaccaccctgggcatataaatagtaggtgctcaaaaatgattgtccttccttccctgaagacagataggaaattagacaggcggcagacagacagatggacatggatggagatgcttttccactgttatctacagccctgtgtcacagcaatgctgctgttagttcaaaagagcagaaatagaaatggaagtccattccagtgtgtggcacacctcagctcggcctggtgctgtgctggctgtccctatggagaccgcatgctgaccaggagcaatggccctctgccactggccagcagcaggacaggaccgtgcctgtcagtaacctgggaagagaggccaaactgccgtatggtttctggtgagggagcccactctcaccctgttgtaaagctgacaactcccaagatggacgctggctacagacagagagggccagacctgtggcaagctgtgccaagttcagtctttggttcactaacgtgagagagaagtcaggtggtcacatgggatctcccagatgttcagtgagagaagtcaggcggtcacataggatctcccagatgttcagtgtggatctgggattctagcgtgcacggcattcaagcaggcaaagcaccttgcccaccagcatgcagtcctcttccagggcaacctctgcatcaaagagatcttgaggagttgagcagggcccattgcctgtgtgaggaggccagtctgaccacggggccgggccagtggccactttctggggaaatcacactgaggccataaagtaagaagggatcccagtgaggcagtgaataagagggcgccttgatgatctctgcagaggcaccctcaccctgtatgtatgctggtgcctctaagcagctttcctccagggtagcaggagggcagtggggactggcctcccgtgtggagcatcctgcacccctaacactgtctgtgtttcccacagtctccatctgctgctgcctcttcatcctcttcctcttcctgtcggagctcactggattcatcacaacagaagtgtaagttattttctctggggcagctgtcttgctggggtccagatgagaagagggggcgatttgggaagggatggaagccttgcaaccggcttgcttctatttccaagcatgtgacatcataaaagggctttgagctcaaagccaaactgagcctcactctgtgaataccattcacattccttcgggcctgggatgcccaggttcacaggcagagtagaatcacccactcatcaccactggccccgagtttggccagtgggtttccatgagtcctttgatgttgtagctggaaggtgctcagacaacccaggtagcttcctcacagagggcaaggtggtcctcctggaagcccctctcatttctcaggcccacgttcaggagtcagcatgggtttcctggcatctaataccacagtcatccatccctgattccagaattagttgtcatccccagcctggtaaccctcctgcgtcgggtcctgacctcatgcttcaaagcctctttgtagctgtgtttacagtttgtggaactgtcatggggctgggccctggcacccccttctcttctgcccagccttggaattttctctttctactcttggaatgtcttggtttcctttgcttccttctcagccatgagacaataggaagctaaaaaccaacgtcatggctgcagctggatcttattacctttgtcaccaaacagccccttttttatggggaaactgaagttatatgaagtagcagtacttgcccacagtgatcaagtgaggtggctcctgagttctgagaagctgggttcacctggtcttagctcacatctggatgtagctgcccacctgtcactgatgtgggagcatctgccctgctgtcactctgacactggtttggtttttttttttttttttttttttttttttggtttttggttttttgagacagggtttctctgtgtagccctggctgtcctggaactcactttgtaaaccaggctagcctcgaactcagaaatccgaatgcctctgcctcccaagtgctgggattaaaggcgtgcaccaccacacccggctctgacacttttaacccagggagtttcatgggcctgtggagagaacaataagacattagaagacccagaatcaggatactacttggctgtgttaccctgacaagttcctgaacctctctgagtcaaagaagtgagagtagatcagacttcaactccacttccagctctggtgctttccatgataacagaccatgtagggatcatcagaagtccccccacagtccccaacaagtgactgtgaccatggggagcatcctctctgtgtcctatggctttgggctttggctgtgtgctcctaaagctgctctctcactacagtgcctctgtgtctgctggctgtggacacaagcaaaatatactgcagttattctaactaactatagttacctttgggaattcgtttctgggaccctcacttcagaggtcccaatatttcagtacaataggagatttgcataaatatacatatcatctacataaagctacatataatcctcttatgtacattttatttttttctgtaagagatttgtttttatttcatgcatatgaatgcttatccgcatgtatttcctgtgcactatgtgcatacacggtatgtgcatacactatgtgcatacacggtatgtgcatacactatgtgcatacatggtgccttcagcgtctagaaaagagggtatcgaatccctcagcactggagttacagagggttgggaggctccaagggatactgggaagtgaacctgggttctctgctcgagcagccagtgctcttaaccgctgaaccatctcttctctccagccttttggttttgtagttttgctttctgtgacagagtcttaccaggtcttactacgtagcccaggctgtcctcctgaggactggaatcacacacagttggatgtcaccactcacagtcttcctctatctacttcaaactgtcttcatcttacttgaacatctaatatgtcattgcaataccacaggggagtagtgggacagtattatgaggtggatcgagatagtgaggctgggagagggaggacacaggacgggcctggtgctttctcaagattaaacgggatggtctgggtaaagagtacttaacccaaagcctgtggacattgtcacctgacagactgtgtctcttggtgcctctgtgtttcccccgtaacacttgaggaagccttagtcagctcagcccagtgaaggcatgccttcagcactgaggcatggccacatcccaagtgacctttgttgtcagagcttgggcctgcaaaggctgtgtagcagactgggccactcaagcaagcccagacagtagactttgcccactgtttacctagggcagggctgtcagagtacagtgtgttccccatcatacccctccctgtgcagggacttcctcttcctacctcctggatgctgtggtcccaggaggaaggaagagggctgaagagtctcaagcctggcccgctggctacttgttgctgttggtgggagcctaatgtccctcccttcttgtgcttccttaccatggtactgacttgtcaggggtccaggcaggcccaagacttaacactacagcctggaaatgtttgctttgccccattgggcccctttctctatggaggcagccctgcctggaaagcatataggttttctctatggaggcagccctgcctgggaagcatataggttagggggaaactgaagaggggttcattctctttcgggaggccactggtcctgtctgatgactttgctcccacagagggccaggggatcccctcttgccatgaagatgttcataactcaaggaaacgaggtcatggcgcagccctggcctgtggctgccagtgacgtgaggtgctccttctggccccatagagttagagggaggtgggtttgtttgtgtgcttgacttccaacccaagctttggccaggctggtgacaatggggaaagaaggtgtcccatgggattcagttttaacataatatctcttttggtgctttctaggtattgtaatgctagtctcatatgcccaggttagcatcttccaatgattgcctcaacattttataaaaccccttgaagtttgtggaggaaactggggcaccaagaagctaaaaacctgtaaggttcataaaaggggcaagggagagcagagtctaagcccaggacctgtgcacacctacagcgtgggcaccctaccccgtcatccctcccgtgtctctgcggggcatgttttaaagcctcaagtcatgaaagccacagcttttgggtaaaagttattgatggttagggacagaagcttcagcaggcagagcttgttcttatacaagcctgatggcctgagttgggtccctgggacctactccactccacaaacttgtcccctgacctccatgtgcgtactcacacacgtcacacatacgctcattagtgatagtacattaaaattaaacttcaaacctatggactgggagactcaagattcccctgtagaattaggtggcaaactagaagaggccacttcaggaagcaggagcttggaggttaccttgagttggttcctaaaacatccctgtactgagccaaaattggggaaactaggagtttatccaagagaagagtggggggcgccatcccgcccagcacccctgaactgagtctcagttgtagctggttgggattagactgttaccaagaacatcctcacccttagcgatgggaggtttaaaggctcctgggcacagagcgacagatcatccctgaaaggtgggtctggggaggggtgagtgtgagccacagaccctggtaaggagtccgatgattgccaggaggaagaggggtggctgggcagctggttgtggagggcatccacccagtaggcagcagctgtgttttccctgtgttttagaagtcagggtttaaaagccaaggttcctgaggcttactggtcaacccacccgccgcctcatacacctcccctcccactcccacccaccagtcactgcggcctccatgctgaatggaagtttccatttgaccagattgttaagcatggaggccagcaaccttgggcaggaatctgaactatttaagtgctcttcaaaaaacaaataaaattgttttccatagatgtcatcaggctcacgcctcagcctagaatctcaaggccttcggctacattccacctacatcccccctaccagtacctcccatcctctctccctacaaggccagttctcacctacctcctccccatgctctggctggtgccccccacctggaatgtagccccattcctccaccagcacacactcttccacttcctggaacttctgagaacctagcacccacactctcctgtgcaccccacaagtttgtgtccatttcacagaaggtgctcaggagttttcattctggttgggggttgtgacactgtggcttcctctggtgtgacagaggaggggttagagggaggtttgcagaacagaaagtcattggacctagggaacctctatatcccataggccctgtactggctagttttgtgtcaacttgacacagctggagttatcacagagaaaggagcttcagttgaggaaatgcctccatgagatccaactgtaaggcattttctcaattagtgatcaagggggaaaggccccttgtgggtggtgccatccctgggctggtagtcttggttctataagaaagcaagctgagcaagccaggggaagcaagccactaaagaacatccctccatggcctctgcatcagctcctgcttcctgacctgcttgagttccaatcctgacttccatggtgatcaacagcagcatggaagtgtaagctgaataaaccctttcctccacatcttgcttcttggtcatgatgtttgtgcaggaatagaaaccctgactaagacaggccctgaggccctggggtggtacatctgaagatgataagaaaagacagtgacacttgcatcacaagtctccctaggggatgccctgctttccagggatctctgtcctctccagacagtgttagcacagtaggaaaggcaaaacacgagtgcccagtaggtagcatcctcctcttactctcctaggctgtgtgatctcagccagttatttgttctgctcgctgaaaacacagtgatcctgcccagcactgcttggccacgttacaggagctgccacatgcaaaagcccggcatcttccagcttttagtggggcagaatacacgtgcaggcagagctgcactaggcctcttacatgcataatgcccttgaccttcacactggtttgccatggattaggggccctaatattttatctcattaaatgttggtgttgataataaagatcatggctagaggctgagcattcaacctgtaatgagactgtgctcaagactctggttctcattggccacctcagcagcctcattcttgatgtatacagagtcattgggggttgctgggacatagagagcatgacattctcatgccaccagcgcacctcctttacctgtttcagatcccccagataacttatgctaccctgtgtacgtaccgtgtgcatagttatggcaccatattgtgtaaggagcaaggaaagaagtctgtgtatgcccagtacagactcagtgtctgcttctgaggggttttgttggttttgttttgttttttgagcttcagctggttgaacccaagggtagaaactctatagcagtggcatatcaactgttctgggagagagcccctttttatttctggggaaaccgaggccattgagaacaaaacccattgtccaagctcagtctaccaggaggcgctgcagccaggaggcgctgcaaaccttggcatcttgggctccccttagcattgtgttctctctgccaagcagagcctgtggtcagccctggagagaaaaagagacacgtgcttacaccacacacacacacacacacacacacacacacacacacacacacatgccctcacaccacacacacatacatacaaacaccacatataccatacacacacacaccacgtacacatacacatgccacgcacacacatgcgtgtacacatgcacacacagcctggcctgctgctttggcctttcagtagccccgagaggtgttaattcttgctcgtctcctttttccctactgttccttcactggttccctcggtgaggtgtgtatgacttacagcaggtgcacaagcccagaactcagtgatcagtgagtctccccttcacagtatcatctcagctgagccaggatgcacgagccatgacttctgctttctagaaggttcttttgcagctcctcctcctgccattctttagacttctattgtcctgggttaatttgcttcttataaactccacccaggacttctccatttaccctgatgaggaagctggggctcagaggtgaagcacctgtcccaggtacctcatcttctaagtggcaaaaggcccacacgccttcttaccgtatcctgagctggctatggggtgtcaggccagtaagagtccctaagctgtagtatacccacaaaaatgttccttttcttcaaagcgagctgaatgttggcagactgtcagccttttaaaatcggctcagccccagccagtggacccggtcagccttggcagccctgcacgggcggctgaggctgcacctggggtggcaggaaactagctggcctggaacatttcccttggacacagaaggcagccgtgctgacctcatctgtaggcggtgcagacaactgaaccatatacatcttacaggcaggggaacagccagttctgcccttacataaccactggcccaggttgccacaggccatgcatttatcctcccctcgggcacctcagcctcttcgtgctgtgtggcccttcagccctggcagctgaccactccggttcttctggctaggagacagggagccatgcctgggagaagcctccccaggggcggtgagctcacctgagccacacctgggatttgcctcactgctgaggtcatctcccgggattgccaagaatgacctcatcccataatccccaagcagtgcgcagatgtctaggtttaccaggtgggaaaggtaagcactcatggaagagtctccctgggaaggggagccctctcccttggctgctgctcagttgatcacacagcaatttccttactagactggcagtcctttggaattaaggctgtggtagacataggtgctgaaaatcaggagggcagaaacaggcccatggcctgtttgtcttttgcccactggtactgtccaatacctaccagtaccctgagcagtatccttcaccctgcataatgaggagaagaagaggaagctgggtagccctggaaaacttgagcgtgaggttctagctcagctgttttgtgctgtgcactcttgggatagaacacccctcctctgaaccttggtttcctgggtgtagaataggaacgaggactttgcacaggagcagatagggtgacacagatgcgtttatttggctttcttgattggcatccctctcaccttttgcttaatgggccgagtattcagcagcctgaagagcaaaatgtgtctgtggctttcatgtccccacgtatatatctgtggttcccacaaagtaacaaactgttcctgagccacagttctcagtaattaagcactatatatcacatatatagtatataatatacactaataatagatcacatgggatggggcctcgtcgagacagaattcacttgttgggcctgatctgttctttcccaacaggagccattcccagggctccctgtgtgtaggacccaagggacctaactgatctgggttatatcatttgttttatagctttttaaaggagaacgtttatcttttgtttgtttgtttgtgggaaaatattttttctttttttattagatattttctttatatacatacgtttatcattttaaagtgtgtgtgtgtgtatgtgtgtgtgtgtgtgtgtgtgtgtgttctcatttgtagaggcagaagagggcattggttctagagctggggttgcagacgttgtgagctgcctaatttgggttctccctaaatttgagtccctaaaagagcactaagtgctcttaaccattgagccatctcttcaatctcatgttgtttcatttttaattggcaaaatggggcacaaggtaatattttgataaactgtcagattaccagctcatctagttagtatgtctattaccttaaacaaaacatttttgctgtctgagagacatttaaaatctcttcttgctaatttgaagtacacactgtgttgttattgcagtcaccatgcctgtgcagtagaacagcaggacttctgttatctgtatcttcctctctattggccagcatccctggtccccatccacgagtgttcaacatagcccagcccccgtatccaacactgctcagttgagcagcctttgaggctaggcctagagatgggtgtcctcctccccgtggggaattatctaggcagctagcctctaaattcagcccctctccctcctttctgcctctgctttatcttcgagggcccctggcttagtgaggaagggaagacctggaagcatccacttccatgcctcttgtggcccatccctgtgtatgccatcagcatgccatgcctgttcccagcagccatgggttctgaaccactatggacacctacaatctggtgtctttgatacacagtggctcctccaggtctcaagcctgctgagacacaagctttctatgttcagtgtcacgtacaccacctgtaccccagcaccagaacatggctgaaataggtcacacttctttggctcttatactgcatctgctgtgacccttgcagaccatgagactataccctccctacttcaggccttggcacatgctctggggacctccctccccttgctgagaccgtgccttttttagcatcttagactcgaaggcctctttatggcatttacctaggaggtgagtgaggtctggttctgcttgtgaccttgatcaaaacagagactagatccggcttgatgccatttcttgaacctgacaggactgagatgccaccaaactgttgagtggatatgtgttgctactgtccctggctgtgaagtggtgtggctgtctgtggccacctgccctgtaacactagtgatagaataatgatctcgttgcttgctcctgcagcctaaggttgtgctacccacatgccacatggaacatgacagatgtggtcacatgaaggatgggaatggctatgttagcccgacgggccacatagaaccacggggtcctgtgtgagggtgcaggagggagaggagggaaggtacggggcacacacgtggtaagctttagttaagcctttggctttgtgacacttgattacagcagccctaggaatccagtacaggcgtctggtcctgtgggagacctggacgtcacccctgtgactttataaggaggagctccataaagcacaggcagtggaggctctgtgcctgttggtgctgggccatgagctgtacaggactctgcgcctcatcttacttttcagcagtgtcactccattcagctgatgggtttatagaggtgaccgtaggaagtactggaaccaggatttgaacttgagtctggacagatgttcttaccagacccatccttcttcctgagtaactgctctccctcctggtgaagctgtattggagagtggctttaaatctggaaccctaactcctgggacctggacatgtgcacactgttgtacccacatggatatctggatcactgagtgctggccaccaagcaaggtggcccctggctatctatcccctatgggcagagtcggtgtctccttctcagtctagatttctgtacttgtctgtccctcagggtgaatgagctctacgtcgatgacccagacaaggacagcggaggcaaaattgacgtcagtctcaacatcagtttacccaatttgcactgtgaatgtgagtattccaatagacctctgtttcagctagccagcctgtgggtgatctgtgtgcagatatgctgagccatctggggtgagcatacgcatgtgtgtgtgtgtgtgtgtgtatgtgtgtgcctgtgtaaatatacatatacatacacatatacacacatgcatacactatacacacatacatacctgcaaaccacacagagcctatggcagcccccacctgttttctggaatcatagatgcctcctgtactctgtagagcaaccacatttgtgcaggtggcgcagggtggtggagtctctctggttcatccagcctaagacccttgagcaagcggcttacggagaggaagaagctttgagggagggagagatgggacttgatcaggcaagaggatgagcccagatgtatgtgcggctgaggtctggtctgaggctggcctccctgcaggagactcaggaacgtggcgacaccataaagccgcctcttctggcaacagtggggccaggactattattatccccgtcggtggctgatggccaccgatggttcctatgggagttacatgacctctcaaacagttatggtgagatgccagttgtgcaagccccagccctttatagcccagagctgcaaaagccagcgggaccctcagtgagggtctttttaactatatcttcctttttaactatagatctcttcatttgctattttaatcaaaaatagaattatttctataaaacaaaacacagcaaaaatctgatttggaggcagatcctgcctcctttgctcaggtgaaccttggcttcagttgtctgtttctcctttagcatggtagacttagtaaccattaccagagtttccaatgggatggcatctagcttaccggttattgtctcccgttgtgaaggtttgatacaccctcagccccactaggtctgcagcctaatgtagcctagttagcttgctcccttctgatcacaagacatggcttaggaacacatcccatagggacagaacattgggtgggcccccaacagggacagggacacattcagctctattcctgcttttggtgagagtgacatcacagcttttagcccacactgagtacagggccagggagcctgttgaaataggtcacttttatttgtttttatattttcatttttttctcttttcttaggaaaataactcatctggcagcctctccttcagggctgattgtatctctgaagcaaggaaattcttagtcaggccagaagactagaccagcagagcaagggctgaggggatgtggctctaggctccatcccagatccagacagtgtgacttcagacaggacaggtgtccttggctgctgactatgccagtccttgtgctgtggtccccttgggtcctgctggctctatagggttatgccatgaatccgcaggagctcagcacagtggctttctttcaccgaccttcagggcggtgtgtggctcagtggtttgcccagtgtgctaaggatccatggttccagcaccactgacacaaagactttcaaaaatgttatacgtaaaaatgcctgttgatctttgtacctctggaaaacccaaagaaacaaagagaagaaaacaccaataattccactacccagtgacaaggtctgtggacattctgacaccattttgtcccattggcttctctccagttcatttcgaaccatggctgaggtcagactacaggtgccctatcatagcctgcttttagtccggggtggagggcgagagccctcgcctggcccaggcttccattcccagcactgtaaatgtgtcatgacagtggtactcttctttatgcaccaaatgcaagggttgttttccgagatacactttgaaaacacagaactgcagctcagtggcagagtgtttgtttattatgagctagatcttcgtacagagggaaatagagatgcaggagaggactcttttgtgatcattttttggtgccctaagcagcctatgctgacaacggaggcctcttttccctctttttttttttttttttttttccgagacagggtttctctgtgtagccctggctatcctggaactcactctgtagaccagactggcctggaactcagaaatctgcctgcctctgcctcctgagtgctgggatcaaaggagtgcgccaccatgccctgctcctctcttttccctcttagtgtgtgcatctgcacacacaggcactgtctatacctgcagtttcacactcacagatccaacagccacagggcaaaaacattcagagaaaaaaaaatacattgcatctgacctggcaatgtacagacctcttctctcgtacttatttcctaaacagtagggctctggaagtcactgcattaccattttgttagtgtaaaatgccagagatcgccagcatgcggagagaaaggtgtgtagggtcccggcgttgtaagcttcagcctgtactcagccagcccgttgctatatattatggtgggaacaaggagtggccagatgttgcacttaagtcaaagaagcaaaggaaagagggcaaagagcagtgatgtcactgtcccctccaagggtctagcctaataacaacaaggacctcctactagaccccactcccaagggtccatcatagccccgaaccaccacaggctgaggtccaagcttctgccacgtgggatgcagtctggcctcaagcggaactgttgagtcagccaggattacttgcgtttctttagctttctcattacagaccagtggcatcatttgtgatggccgtgtcatgtgcccttccacgatggctggcacataacttccctacacccactgaggaacgtggctgttcccattttccctttatgcctggttgtcttttaaaatagcttattttaaaagagctattctttctctgaagcaagcttcctctgatgtgcccttcaggaagcttgctacatcccatggtagacaagagcctctcttccctgagtgaggtaacccagtcacaaaagaacacacacggtatgagctcactgataagtggatattagcccagaagtttggaatacccaagatagaattcacagaccacatgaagctcaagaaggaggaagaccacagtctttttcttggctactttgatccttcttagaagggggaacaaaatacattggaggaaatacagagacaaagtttggggcagaaactgaaggaaaggccattcagtaactgtcgcacctggggatccatcccatatacagttaccaaacccagacactattgtggatgcttgctaacgggagtctgatatagctgtcttctgagaggctctgccaatgcctgacaaatacagaggtggaaactcatagccatccattggactgagcacagggtccccaacggaggagctagagaaagtacccaagggactgaagggttttgcagccccataggaggaacaacaatatgaaccaaccagtatctccagggctcccagggactaaacctccaaccaaagagtacagaaagagggactcaaggcttcagttgcatctgtgttccatgagtggagaggcccttggacttgtgaagactcgatgccccagtgtaggggaatgctaggacagggaagcaggagtgggtgggtcagtgagcaagggtaggggggatgggataggagggttttcagagggaaaatgaggaaaggggataaaacttgcaatgtaaacaaagaaagaaaacatctaataagaaaaatgagcctttcttcctgcatatactgggaccatctcatggaacacagtagtgcagcctgctcattgttacagtgcagaagctgagccacagtagggctacagagccatgctggagtcagccatggggtcagggtgggacacagtcttctcgtgtgagctaaagaacctcattaagaggcctgtgctcctgcaggttacagcttggctcttcccatgatgccccctggtgcttaggcaggagcatggggcctggtagttatagacactgagtaatggaaggtgtggatgaaagacagattataaagaagaaatgaatgcctggatccagagtgtgaggcaccacttgccacatgctgcgctcagacgctgcgctgagcgcttgccacacctaccacctctgcgatccacacactcttccactgaaagttcaatgattgtcacctcatatgtcagaaacaaatgtatggaggcattgagggtaatgagtacctaagccacggtcacactggggaaaggcacagtcaggatccaggtgaccagcgtagccaacccatccctcttaccccacagccttcatttggccttgcatgtagctgagtcatgctggattctgcatccttggctggtctagcccctgctgcttcttagctcttccttcatcctctccagccttaggcagtggtggagggtgctgtcactctgggggtgggtgggactgttttgggtgctgtgactgtgaaggagtggaacgattttgagcactgtgactctgaggtgggtgcactgtttgggggtgctgtgtttctagggggaatgtgaagtagttttgagcactgagactctgaggggatgggactgtttggggcactgtgggtctggtgagggtgggactgttttggttgctgtgactgtgttggggaactgtttggggtactgtgactcatagccaagcaacccccttctcccctactggttgacttcccatgtagcctgggtttcctgggcatcgtgttcatggagggcaaatggggcctctgtagaagcgggctgctccccactctacatgggtgtgggtaactgctctctttgtccctcacagtggtcgggcttgacatccaagatgagatgggcagacacgaagtgggccacatcgacaattccatgaagatcccgctgaataatggagccggctgccgcttcgagggccagttcagcatcaacaaggtacggagggaggcactgcctgggcccttttcctgccccctgcccactcgaccctaacagagtcagcacatgactgccgagaattttcctgagactgggtaggctctgcattccctgagattctagagcctctgatggtgggttcagaaagagctgcccctcgctggagtggaaattaccaagggaggtgagacctggcttcaagtcctcttcctcctcagcaagcagtggccacaggacattggggtttacagctgcgatgacagcaatgccacagtggcatccaccacggcacaaagcccacgggtgcaaatgagagagcacactgttcattccaggcctgtatacgcaccttgcatcagagtcagatctaggctccgtccggcaacactgtggacaggtgagcgagtgaggtcccaaggcaggtggcgatagacagccagaacatgccatcactgccttacatctgccgatcagctcagtgtaggttgtccccttggtgggctacatggggatggaccagaggaggccaagagctgaagtggaaagggatatagagtcagcaggtcttcctataggagtgagcactggacagcagtgtgggaagtcataggtttaggctgcagccacccccagtggggaccaccaacaaggacccccaacagcatcgccttggaagtgccagggaggcagaaccttgggctctacctccagcatcctgaaatgctcccaagactgcagtcaccaaactctaaggatgtcaagactcctaaggagagtgtggagccatattataaacgtgggatccattaaacccctgagagattgatctgcagacaccccaaagaatgtacgtaagccccatctttgtttttaactaggctctaactcttttttttttttttaaattatatgaggtgtcttcagacacaccagaagagggcatcagattccattacagatggttgtgagccaccatgtggttgctgggaattgaactcaggacctttggaagaacagtcatcactcttaaccgctgagccatctctccagccctaggcactaactcttaatttagcaatttctactttagttaataaaaaaacaaccaaatcattagcaatacttgtggctttgctactagaaactgctggcattcacactacattatagttgtaaagaatttccaggtaccgtgcacacatccccactttgagaatgacagccaccaacacatggctaaacacttgggggaaacgcaccactttgataatagagtcagacagtgaagcggatgcttcggtggggctgcaggggaaggcgtcgtctactgatggtgtttgaagattgcgggcacgtgtctatacgtactcacttcccagtcatgagatgtggttactcgcctttgaacatgcatactcctgacaactcaggcgtcacactacctacctcttagcaaacatgtcctccattcccttgggtgggctgtgttgtggctcgcagatagctctgggtgagccagaatttgccttttcaagtcggatcagcttgtgttcaaaaagcctgactcaggccagggcatctgtggaagggttgtccagtccttgtgctatggccactgttcaatggactcttacctggctcttaaccccaaagcatgggagtcaagtaacattggagagtttagggctaggtctgaacccaggcacttgggccactgggctctgcactctgcatatggctactgctttttaacatgtgtattacacaagctatgactagagtgaccatattctccaggcacagcctggaccactgtccacccaaccctttgcagaatgtggagtcccttctgacatcaccctctctcctttgttggggtcttgtgtctctgaagagttgtcattaagatagcagtgtaacagcctagtatgaggacaaagaggacagctgtccctcccgtctcccatcattagacacagacttgtcccatggtccctttatccaaccatcaggacatcgaccaatagccagatacagagttcgctgcaggtaccctggcagcccccagcagcccagactgagcctgcccagtagcctcactaatcatggctgcccctggagggaaggcaaagggaagggagagtgggggctgactccagctatatatttttaaaatccatcagagacactgacgtaggtgcctaagtcacaggttctaaaagcgtcgccttctgtttctccagctcagcgtgtgctagtgtgactcagacccctgtggtggatttggtgtggagtggagtggattactgagtcacagccttgaagggctggcagcaggcggcaggtacccaggagccagccttctccattctcttaaccctggggacacagaccccaaacccaaggcattctgtacctttggcctggcccactgcccagaaaacctgacaggacaccttcagtctcaggaattatgactgtatcgtgtaaggggtttctttttttcactgcccagtgcctcctccgatgttggaatggatcccaggccttgtgtatgtgagaggcaagatgttcttcctgacgtaaatgtctagcttcatccccactgagctacaccctagccctgtgcagattttgtaatggaaatcagtccaggtactacttacactgtgaaaggaagcgtgaaattgtttttaaaagcagtggcttttcctcacaccctgttgctggcccgcccaaggccctttctcctcaagtactgaagcatgctcatcccgtgtacctgtgtacctcttgccattgcaaaaccctctgtggtcatcatccccattctctgatgggaaaactgaggcacagaatgataactgggcttgagcccaggtgccagatgtggagaatcacttctactgggtccctgagttagaccacactgatgctgtgctcacttgagagaccttcctgggtggccccagactccctgggatgtgtgctacggctgaagccagcctgatactggtggcactgattccctgaggggatggtcacacaccaggctgtagcagtgaccaccccccaccccccgccccagctggttttcagtgtgtcagttgggattttagctccccagcctcacctgcctgcgttttcttcccatgccttccctccaccttgaccagcttctgtttagggctttcctacctctcgggcttgcttctgctgcctgtgctctgaggcctttccttgtacctgaaatagagctgagggtcctccccagcctgagtgtagccctcagcaaggtggggaaagctttgtgggcaggcattttaggaagaagtggcaggcacaaaggcctcaaggcggagctgtgcagggtactattcccagtgcgggaggctgcagggtgctgttcccagcgcgggaggctgcagggtgctgttcccagtgtgggaggctgcagggtgctgttcccagtgcgggaggctgcagggtgctgttcccagtgcgggaggctgcagggtactattcccagtgcgggaggctgcagggtgctgttcccagtgcgggaggctgcagggtactgttcccagtgcgggaggctgcagggtgctgttcccagcgcgggaggctgggggtgagtggagctgagggtgctgttgatgaggccaagggaggtggactgagtgtgaccagtggccagaatacatcacaggagcactactgggtcactcggtttttccgttactctgaaatgctgaggcaatgatgaagacggaaagaacttagacctagaggctgaaagtccaggatgagtccttgtcacttggcctctggtgaggatctctcagtggacaatatcacagtagtggacacgggacagagagggtcctaaaggaagggtggtgtggtgggacaggaagcagagagaggccaggcctggcttcctcttttaaaaatcaacctagggcccatgagaatcacatcggcccctcctgaggtcagtgtccctcggtgacctaaggattaccacccccacctaggcaccaccttgctcatggccacaaccccagcacgttgtgcaataaactcccttcaaagaagagactggtgcccagaagccttgaagggcttagggctgaggtgtggcccaatcaaagatagggtttagtacactttctctcatggccctggggaaggggctgcagggagaggcaagggtgagcagacactgactgggagccagggcagaagccactttgagatcctccacagaaatcttgcgtagggataacaatggcctacaaggccactgtcatcagtttctgacggtggtgatgaggctgactgggtagctgtaagcttagtttagagttcttggaagtcactttggtctcctgactcagagtgcacccctcacccactgctgagccagcaacccggagtctgcagatatgggcagagactgctgtcattttaagtccaggctcagtgtcaggtgcccacatgcgcacttcacatgcgctcttgccctaggttgtcccggatacttctttcagtagctcctgtgagtgtactgttcttcttcaaactcatacagttagaaatgctacgagccagggtcccggtgccggtgtatgtatgactctggtgccccagaccatgcagaccacacagcccttgcagtcagccccccttggacagccacccagatatatgaaacctgcctttctccctccaggttcccggcaacttccatgtgtccacacacagtgccacagcgcagccacagaacccggacatgacacataccatccataaactctcctttggggatacgctacaggtgagcaggggacagggtgacatggccgtgagctggtccctaagagtcatccacatgagatcctctttgtcctgtcttctgaggatgtgcctgtggtggctatggtgtcagtggtgccaccagccacacaacggactgagatgctcagcctgggagggaggtggactccagggtttggctcagtcccttcagagctgcttctgcccgtttcctgttgctgttactgagcagcacagagtaggtgggtgtttagtgaactgaaatctatctaagctagagctctggaggctctgaagtaggagcatagaaccagcacgggactgtggagagggcctctctcttcttgcatccaaacgtggtcaggcccatgatgggcactgacacaaggcccaggcaaggacgcgtcagacacattaccctctctcaggaggcccttctacactacacacaacccttcatttttatattcacagactcttaagctgacattcaggaaaattaataagcatgtatctgtgacccccagaatgacacatgtagacatgaaatatcaaaggtctgagacacctatgagggctgctctcagttggctgaacacccaaagtgatgactgaggaggtggggagcagggaattgggtttgtatggggaaaacctttgcttggttgatgaagaggatgctgacaagtgtggcccctgtacaccaagtgtacacctgccacgaggaagaaggacccacacagcaaggctattggcatggacatgagggaggggctgtaacctgggtaaggagggagaggacctaggctaaggcagtggagagggccgaccagagctcagaagcaaaggacaacagctctgctccacctgagtacacagatattccagctcagagccaacccatgcccatctgatcgcttgaaaaacatttatcaaacatctgctgtgtgccaagtcttgcacatattggtcaggctgagggtgggtcctgctggtctgactcttccagcctacagggcgggcataccatcacatctccatccttggagtcagaaaccaaatcttcacactttcggtccaaggcagcaaatggacagccttccctcccccgcgagtgggttcagcctgagggacaggtcactcacctgctaaagtgttttctctgcaggaacctaccccgtctactgctctgatctccctccctcccgcttccctgaggtcccatgggcctctatcaggcccagtctctgggctcagttctttgcaaggtctgcttatttggcccactttgggcctccctccacatccatgtcaattatccctcctcccggaagcccttgctaactcggtccaatggctgggttgccctttatgaccaaatggcccctggtcagtccccacaagcaaggccaggcttgaaggtgggaacccccaaggaactgtctctcactgtgcttctctgcaggtccagaatgttcacggggctttcaatgctcttgggggagcagacagactcacctccaaccgtgagtatcttagcatggagcaaccccctcccctgcagaagtccccgtccagccggtggcatgggactagggaagccagcggggcagaagtcaggtgcttgctgcaagccaaggtcatagtctcacaccattccttcccccacagctgccctgtatagtacacagactcattcctgtcttttagaaagggaagagggtagcctgtccctagggaaggttgattgtacccccgagctattgccaagctccaacagcatctgctgtccctgctactgaccactgttttgccgttgtcctgagtggaggcagtcacctggatcccacagagcagttacagaaccagaacccactctgtgagaaccagctctgtaggtggccagtgggggaaaccagctggtccctcccctcctgcccaaacccttcctatcaaccattggctccttccaaagtcttagtgccgaatctctacttgccaaagactgcacacacacacacctccattcttacacacacacacacacctccattacacacacacacacacacacacacacacacacccctccattcttacacacacacacacacacacacacacctccattatacacacacacacatacctccattcttacacacacacacacatacctccattacacacacacacatacctccattcttacacacacacacatacctccattacacacacacacacacacacacacacacacacacacacacacacacctccattcttacacatgcccatatgtgcatgttgtgcgtgcatgcacacaatatgctaagaaaaataatgtccactgggtcactttgaagcatcatttatttgtgtcagcccttgtgcgtggtagggacctgcatcttggaatgtgggcagctgttggccatgatggcctcagggctgttaggcagtcagacactgaatgcatattgatcaggcacagtaccaagttctagagacaggaaggtgagtaaatgaagcaagcagcctctgcaggcctccattctgtgctgtcaacttggaagtgttcatgatacctgggcctgaggcagaacccctgtgactccttaaggacatccgtctggcgtgttcctactggggaggaaatgtgaactgattctctgtgcacagtagacataagggtggctctttttttttccttttgtgactacctaatgttttgtacaaatagcaacaacaacaacaaaatagtagagttatgattttcactaaggccttcctttcttcaggttttatccttggagagtgggaatttgagacttgtacttcaaggtgatctttggcctcctggtttaggtatagatgtgagcccatctcatgggagtttccagggatgaagactagaatcggcctttaaccccatgtgaccctagtactctggaccctgagagccattgtgggcatgagcaagaggtgttgggtcccctgtgcttagcttaaaggctccagggctttccccagttttcctgagggtgtgtgttgggggggggggtcacctccatcccaggagtgctgcccttttctgaggagacagcagggccagaactagtcaaggctggaatgcttgctccatgctcaccactcttacagatctgaatctgatctgcagagaccaggattagaacccagaagactaaactcccatgttcttttagctccatggttcctagcccaaggttctagaaggaataagagggatggacattgggcctcattttttgctcgggaaggctgaggcagctctggttagctcatgtttatcagtagctgattgatcccttcatcctttgtccagccatcctgtccactccttcattcagcaggccttgccactgtctgccctgtcccaggctccgtgcagggtttaggggcaggaatgtaagactttgtccttgcactcagcaactttgccatccaggctgggaggagacaggggcgctgggtgaaaaggtcgtgttaaactattacagggctgaagggtcagcagtttattgagaaagagggaagacagtgaccagattctgttgtttgttttggcagtgttgggattgaggccaagggcaggtttatgccaggcaggcgcttgaccccagccctctgggtttgatcagtcttacttagttctttctggagcccagagcccagattattttaaaacttaaaagcagacagacaatacctacaatgaaatggggtctttcttgagtcccacctttctccctggaaaatttctctgtgtgtgagggatggtggggaatgtaattttgccagtctctctctagtctagttaaggatgaaactgaagctgctctgtttcctggggcttctctctagacaattcttggtgaccacgcattaaagaggatgtgttccctggcccctacttcacaggagcgtgctgctcctgggcctgaatctcagagaaaatgccccctcagcacccctcgttaatggctatcccatttgtaagtgtgtggctcagagtattatatattatgtagtgcagatctaacaatcccagcaagccacattctgaagagaaaggggagaggaccctacagtaccaggaggacttgaacttggggttacaggcagagccacctgccaggcagtgcccaccccatctcatcttatgctgtattcctgcagccctggcctcccatgactacatcttgaagattgtacccacagtgtatgaggacaagagcggcaagcagcgctactcctaccagtacacagtggccaacaaggtgagtgggccgtgaacgggctgagcattgcaattgctccctctgctggccaagggcataggcgatgccccgcacattctgctgaagggaatttcagtggggtggacagggagtgtccaggctcattctctagtctgagtaaagatgaaataccagttcttgccgtggtagtggcctcaaggtccaggtgagacactcttaacaaggagataagatgtattctgtttgaagtaggcagaagaccatcccagctctgacattgtctggtcctggtttcttcaggctcctgttgatcagcacatggccgatgctttgcattaggcagggaatcctatcaaggtggctgtggacgtctcaggaccccaacagtccaagagacacacaggtcttctgggaagccaagggacatccaagccaaagaaatgagatggcacagcggttagtggcttgagcctctccagaaagcatggcttgtgccaatggaacataggcacttggagtaggttcccctgtttaccacgaggctcctgtttctgctgttgcagggccacccagacccttagtataaatgatggagtgttcagctcaattaactatcattatggttgaggaactcgccaagctgtgtagttacagtgtaggaattagacccaggttcctcttgggctccagagccccctggttgctcacccactcagtccaaatagggatcgtccaggcttgcccacttggacagcctcttggtcatgggtccctatgctctgattccctttgatccataactctctccgagagacttattgcttacattcactatttcaggccgtgtctgtcctactctctggtggcataacaaaattctaagagcctaagtagtaagtaaagaatagaagtcagccaggcagtggtggcgcacgcctttaatcctagcacttgggaggcagaggcaggtggatttctgaattcaaggccagcctggtctacagagtgagttccaggccagccagggctacacagagaaaccctgtcttgaaccttccccctaccccccccccaaaaagaaaaaagaaaaaaaaagaaagaaaatagaagttaatttatctcatggattgggaaagaggaagtcaaagagatcaaccccagcctgtggtgagccttcttgctgtgttgtccagtggagggcagggcatggagagacacaagcatacaagcttagaagtgctttcctcttcttataggagagctaatgctaccattgacacttacctcgtggcctcatctaacctaatcacctcccagattaccacctccagccaccaccaatgtaggcttacttccgggttcagccccttgatgtacacaaaggacctgtaactttagatggcgaatagccgtggtccccctgccccacatgcacagggctctgggctcagcccagcactgcagcatgcgtatgacttctggggagcatatttcaaccattgtactcattataacctccccccagtgctgccacacatcagcaggaagcagggccctggaccacactgccccatcctagctcagtcatgtgtccttgtttgtaatatgtccatggcagttacttcacaagattgctgtcaaatgaagcaatgttttcagaaagctcccagctcactgggaaggctgggtaattggtacactactgctgctagatttcattctgtctcttaccccctcagcgctgggctgtggcccagacaatcaccctgggaaagctgagtttcctctgctgcaggcttcctccatcaaagctttggcaagggcctggtggctggaccagctcactcagcgttctctgtggctttgcccccagcctgttctgtgaatggaggtggctgtccagtgggttaacactcagtggtgtccatgggatcactccagctgctcaagaccagtgctggggacatgggggttgggcctggggaccccggcatccatctccatttgttgtaaacaagagacgcgagcccaagcctttcaggaccctgaagtgctcaaaccaggtcctgtgggtcatcagctcagatccctgttccttggtggccatttggccaatgctatgtgcatccttacgagccatggcaggttgggcactgtaccttccctgttctctgtgctggccctacttggtggacaagttcacacccacttggttcacctgtcaggcaggctatcttcttattcatggtttagaatgccccttccttagtgagccttccccatccccctgagcagaactggctcacctatggcctgctgagcaccctcctccaccctccctacacggatactgttagaagctagtgatgcgatgatgtcttcatccaccagcctgtgactcctctaggggaggggcttcatcaccccaagaaccttaggacagcggaggcagccagcagaataaatgagcagattccgtgtgactggcaagtcaaggaggaaatgctcagaccgagttcaaagcccactttcctcttccacgtcaccctcagatctgtgctccgttctggctccacttctaagctatgtggtctgtttcccatagttgaagggacccagcgtgctttcactatgctgcctgtccagggcttccagagcagctgagaggaggctgcctggacaccctctgcatcccacaccctcacccacctgaggctggttctgcttgtaacactccttcctcctctctcctgcaggagtacgttgcctacagccacacgggacgcattatccctgccatctggttccgctatgacctcagccccatcacagtcaagtacacagagagaagacaacccctgtacaggttcatcaccacagtaagtacccagggcccagagccagccgtgcagctgctgtcagcccccttgccgaggcaaccctccctcgcctatgcttgctggaagcagatggagcctgctgggccccaggtgagcgcaggtggctttgattctctgacccctgagaagtgttaccagaagcaggctggaacctctggcgtccccctagctggtgtgttgtgggaggtgccacttagtgcaactgatgcctgagggaaatctccactggcttcaggccgctggtgatttttcttctttgtggaaaacgttttttcagcacttggttttttgagacagggtctcactatttcagtcctggctgtccgagaactcattctgtagatcaggctagcctcagattcaacagagatcctgagtagcaggattaaaggtttgcactgcgatggcatgccctttcagcttcttctctgtgtcttctccggccctgccgtcctgggtccagtgtggtccttcttcctgctgcgttctcttcctttgcttttccttctctctgccttgtcttctactctgagcaacagtaggatgtcggttttcttttacacggactctctgtcacatgaacagtttcctggcttccaactcatcacccttgggtccagagctggtgggtcacggtgcctgctccacccaggaggctccagggatccagagtcagcagaggtgacagccaggatggctctctacctgtcagatttggacactgggcctaaagatgtatgtacttctgggaggccttgagcaggggaagcagggtcttactgtgtagcccaggcatagcagcctcctacatggctaggagtgccgctttgcccaactttatacttttaatattggtttgagatcgggggtctcaatcctggctggtacgtttcctgctatggcagagtctgcggtagtcagactcttctagaacagatgggatctatgaagctggtttgattgttgggtcgtcagcagacatggctatatctagtcatgtatctgtcccagactttcagtctgtttgtctttctctatcctggcttccttctcagacagaacttagcaatagacgtttcctatttctctgtaatcccaggccaaaccccagaaaggacaatgttgtccttgttccagctgaggtccttctgtccttctggcttagaaaatggaattctctgcttggtctgggctaggtctcgtatcctctctggaaccagagattgtgaagggggtagcattactggagaggaaactccaggccagtttctgggaggaggatgagcaggcgctgcgaggtgtatggtcagggaggtgtctgtggccaggccattgcttttaaccagcgacataagaataatgatctttgttcttgatacctcccaggcctgtgaggctcagtcagtgtcctggaaggggcaaatgccactaaaaagagcaggtggatacactgagtgtcattatcctggggcttagatacgcctccagtcttcgaccgtcctgtgactgcacgggagtccaaacagtaccgcactggggctggaaggggcatgtctgccacacaactgcatgaggggcagtcagcagcatctacataggaagacctcacagcagcacctagcccctaagtggccaaaaggagccaggctggagctaaggaacattgttcccccggcagacccagtgaacgcctacagttgaacttgaaaaacattgttaagactccctcaagcaatattcaaagtctgcccctcaacacaaaggaggagaggagataaaactagggacctacatgtaggaagaaagttataaaagtttttacctccaaatcaagagatttatgaacaaatgcttctacccaagatcccccgggggagcacatgctaagcacatgtgggcgccggcttttcctattctggtcccaccgcatacccagaataagccagcctctgagatccaagcagatgtcccctgcgcttccaggcaggtgtggcctgtcctcagaggcccggggggctgcactgtcaactgtagcatggacacaccgcactgctaggctgagacggtccctccttgggctccagagcaccagttcccatttgttcatgggaagcagctgagcccctgagcattaaaacctcttggcaagtggctggcaaatgagacagctttggttgctcctttaccgtttgctagaatttgccgtgtgaggtctcagtgaacctgaccttccaggagtttccctgtagtgtggaacatataggaacacagtgctggggctggagattcagctcagtggttaagatcattgactgcttttgcagaggacctgggttcaattcccagcacccacatagaagcttacaactgcctataattccagttctgggatctaacaccttcctctggtctcttgtggacacacatgcacatggcgctgtgtatacatatggccaagtactcctgcatctaaagtaaaaacaacagagagagagagagcactgtgccaggagatccctgctcccaggttccacagcggcagagaggaggccctcacacctcttcagcaaagccctgacataaagggagaagaaggctgtcttggaaagggccttgtgttttcagagacaccaatccagcatgcctttccaaggccaaccagctctctccttgggagagaccctgttaggtcaaggtgagccattgacctttcaagaactggaggttccacaagccacagggaagatctccccccccaacgccccccaacctgtcaaccgtcaccattgggtccacttctgctggaatgaggccccataaatcctcaggcttgctaaccacaccactccatggaacctcctgacattaacttggtttgtttctggaaggcctcaggctgccatcttggttgccatgacaactgtaggggtcagctcctgaaccagctggctcctggcagattgcgtcattgtggagcttcaaagcctcttgtcaagagacagcagatgtgaggatgctgctggctctcagacacactgcacaaagacccctggagcctgtggagggtgggtggtgctgtggcatagtggagacacctgccgcggacttctcttcctcggctcttaataccaaacacttgcgtgcgaagctctaaactccaagtgagtgccctctgcaaatagccctgggtgtgggggggtgcttaggccaagatgtcatgtgacgacttcagaggaagggcagcagctgtggatggcataaggggcagagctttttcacatacctgatacctggctgattctggactcttcagagtcagtctgcagaggacatgccctaccacacccagtaccaggctgcccaaggcttctctctctggacctcacaacacctcagtcaaacctacacctgttaccagagcattcttccccaaaaagaataagccttgcatttggcagtgtgcacgtgcctacatctcccccacccccactcctccatatctgtcccagccccccctcctgctgtcagctgagattgcctgtaagtgggtgtggtgacagattgggtgacttgaggtgtcagatctctgtctttgcatgacttattttatctgagagagggaatacccagaagccttaaggtgacaaattgagttggtgactgtaagagctctcgcccaccagaaagtacagcggctgatggcatgcgccctttgaacgctatcatgcggctgtttcaactgaagagacacttaggggccgccagatgagggaattttgctggagtaagccccacccacttatattcttcccactgtcacgctccccccccacaccttgcttttcttcccaggagaagaatgccccatgccccatgctggagattgtacctcacagctgccagggccagttatagcctctgggtgtcatgattcacttatcagtgtccccagattgcagcacagggcctggcccagactcagtgttcacagatgtgtaagggacagctgcttacggaggtgatagtgactacctttattaagtgcctgccacgtatcaggcaattttgtaattagcccttaaccttcccaggaacctctgagtagattctagtttgtgttttagatatgagttcaactaaggctcagagaagtaaagaaactcttccaagaccacacagctcgtaaatgatgagctgggacttgagccccgtgcccaccaacatcttctcctcaccacatccatcttcacaagcaagggctctcaagagtggcacagccacagaggccctggaagtcatgaccctcttggtacagaagacaccagtgaggtttgccgggacctgcgtctgttgggtgtctgcctgcctttcatagcaagagctgaggaggccggaagagttggttggaaccagcaggactggggcatagctcagtggaagagcgcacacttagcaggcaggaagctggtgtttggcccctagcactgtttggcttagtttcatttggttggtgggtaggtctgaggcattagcttgcttgaaaagagttggggtatggtggtgtgtgtttgcaacctcacagctgggaggcagaaacagctggctcctggggcctcactggccagccggcttgctcagcatgttcccaaccagagagagaccctgtcctaagatagatggctcctaggggtctggcacacgcgtgtgtgcatgtttctgtacacacacacacacacacacacacacggttggggggacagagttttacactcatctaaggttatataagttaagaaagggccactttgctacctggacagggaacagtctcacaccctcctccgaatggctggattctctcctctgcctgcttctcttccctgaaccaagagctacaagtgtgcacaccttggtcccctcccgtaccatcactgtgatgtgcaggacagaacaaaacccaaagcagaagctccatgattcagggctgggatgtgcaggggccttgggatctgtcccatctggggcagctgagtgcaaaggggtcttttggagagctgtgtgcagggcaggtggacggaatggggcagaatgagggggaaggtctcacactcaggtctctaaagtcggttctacagggtgagagggataggaaagcaggcagtgggcaccatgggaggtggggtggggttttcaatgatgcgaagcttctaacctaccaacgtctgtaagcaggggtttcagatatcctgattgcaggatatttgctgtggaaggccctcatagaaaaaccaagaaaacaaatacaataggcttagaagttcaccatatacaaggagatgcactgaagggcgggacaaggtggtctaataggaaaaacaggcctgcaacctctcgaacccaggctcggtgatgcctgctttcttaatggctgcatgaccttggacgagccgtcttctcccctttggcacagtcacagcactgagtgagaaagaaagcagaaggaaacagtgtcccagggcaggctgtcggtgctcaaccaaggtgcagctttgtggtagggtaggaatgggtatttcagttaagcgccctttccctcagactgccctccagttagggaccgaggataagaggtctagaggacatgacatgctgagtggtaaccaccgcccctcccctcctcccatccccaaactctcccgagcccaatcatcagcttcccttcccgacggcccccactctgactctgcgacttgggtgttctcatcttcggctccagcctgtctgcctccggcagcatatgctgagactcggttcattatttatttcctctgacggtgccttttccacaagctctgaaacctcactgcctgcctgaggaaagatgcacagttcctggcatttgcagtcacctcaccgccacccctctcgtaggtgagagaaactgaggcccagagatgtaaactagccttcctggccaaaatcacagagctggcttccacccaggagtgtttgccctggcgcctgctttcagtcccttaccagagtggaggtgatacaggctttttcacagcaagccactgaggagtaaacacaggctcagaggaggatgttagtcctggtagaacacgaactccactctctagcccagaccttctgtggcataagcaatcgagggccacggttacaatgtaaagaaatacatcttttaaagttaggctagggtataaactccaggacagaacacttgcctggcatgcttgaggcccaggtgctaaaaaagaaaaaaaatcaaagccaatgaactaggctaggtgaaatgctaactcagcatgtaaagacacccacctcaaggctggtgacctgagtttgatccctctcccccacgtggtggatggagagacctggctcgtgcatattgtcttctgacctccgcgtggtcgccacagtccatgcatctgcatgcacataagtaaatgtaacttaaacatgaattacaaagtgcaatattcaggtcagaggacttcattctggtcagcacagaaggttgggaagctgtaagtctcagaaagaaggtgctagaccagaagagaggtgtgttggtggttagtgctcattaaaattgctgcttctggacacactggggcctgggtagggaggcaggtaagaggcagagtgtccttctctggctcagcagctctcctccctgagccaccacagcgaggtccccttaccctggtcatccctctgtcctgaggcccggtggaggcaaggccacggtcgtaagcactgaagtgtgtatgcgtgctcatagcccttatttcacagcacactgggggtaagaaacatccctccaagccagctgctgatggcaatgactcagagggcagaggtgggaggacctctgagtttgaggctagcctggtctacagagtgagttccaggatagccagggctacacagagaaaccctgtgtttcttggagagagacagacagccacactgatggtggacctaagcctggttctacagactgactgtcttaagcagcaaagtacctcaaggccccaggcagcattgcccaggcttggagacttaaggagccaattagcaaatgcccgctctgtaccaacgaccttctatctcctctcccttggccttgaatataagagagcaagcaatagggttgaccctgtccagacaccaggggctccccgactagggaagtaagaagggtctctgacctaaggaaccaggcccagagggaggctcttcgttgtgaatacgccttgacacgcccctgagacacgtatcctggacaggagttacctgttacagcccaggctgactacagagacccatggccaacatgggtcttgggccacttcgaagtcttcagagaatcttagtatgctattcctacatgatagcttgtcttcctcttaaagtgccaggaggaagggaatggggacagaaggctctaagaagtaatcggtaggattccacacatttttttttcttttctgattaaagtggatctcggtacatagaaagcaccacactcggcaccaaggttggagcctgagatcatttactgagcacctactgagttccaggtacactggaggtctgctctgcagaatgactgtcagtgaagtcagggtgcttttcctgtttatagatgggacagctgaggccctgagagacgtgtgcatggcagccacggctcaagccccaggggatgatttctgtctcctgtgccagccaggaaggcccagactccccagccctcacctccggcctgccctggttagttgtattgaggaacttccactccatctctatagttattcgtttattcatgtggaccttgggccctccctgcaggtcagggcgatgctgagtgtccagtggcctgtcccctctcctggccattcttagcatccctcctgcaccatctctagctttatctcacaactgctgtattcattttttcccatgttgcccaagacatcatcagtggtgaaggaggaccatgacgccctcgtgtggcccacagcttcatttcccatgtaggagccctgaccttctcagaataaaagatgaccaagagtggcagtttccccagtgagtcccagtgtggtatctcctggtgctggtagctgccatgtccctttgtgtgtcaattccaggatactccatgcttcaagccccttgcttgtgcctgtgactgtcacccacctcactctagttaggattaaggatggggatgagatcaacaatgtccttagggcttgtttccatagctacagtgtgaacatactgaaagggaattgtctgacataaatggttcgtagatcttaaataatattactataatcatactatttctattttattatcctttgtcttttattgtgcctagtttgaaaactaaggaattagtactactattttaaaagtgtacatttaaatattaagtttgaagctaactagttctgtacaccaggctgagggagcactgtagtgaaagcaagggtgggcccctagaatctcctcagcacttcagatgcccccgagctctatcaagattcctgtcttccttgcagcccacagaatctagtccttcagacacgccacaggagtgggttagctgacatcaggaggtaaacctggagggttactgcagcatccctggagcctccaggctgacagtgacttacactgggatggggctctggcatagcttacatgctccctcagtttccccaaaggccgcatcttcttgtgggcctcagtcatgggtcatctccctctaacctgggccagcccagtgaaagcagaccttaagacggtgccaggcttgtgtgagtcataggaacccaggctccgagttgtgtgtggatgaaggcagatggcagggttattttttattttttgctccattgcactgaagtcacattttcctacccaagctctaaaagcattctgtggtataaaatctgccatcatctgacccacgctaccgaaataaagcagctcactgccgtcattctccctgaaaagtgcctctgtgtcatgcgccaggactggtggggagaggcctggcctgtttaaaaacacttcatcataatccccacagcgtcccccatcctcttagctccctggggggctgctcgggtttctcaggctgttattactggaatgtcagctgctctgcttccaggccatccacacagacctgctctgtcttaggccttcgccgcctccgcttagctcattttacgaaaacaccatttcaaagataaatgccaatgtggcctgctttcctgtcactgtctctgtgtcctctggcttcccaccccttggcatcaattgatccattagggcaccactgccacccagagtcctgtggtggttatgtgtcattgatatctgtctacagatgcatacccagaaagtgtgtgtgtctttaatccctgcatatgagaggcagagacaggtggatctctgagtctgaagccggcttgagctacatactagataatctgggctacccagagaaaccatgtcttaaaaacaaaaaataaaataaatataatatatatgaatgtgtatgtaaggcatacataagttaagttgcaaatggactttcacaatttagctagtacagctgctcctccatgtgtgtcggagttacattccatgttctcatcttaaattgaaaatagcaaaataaaaagtatacttagggcgctgggcatgtaacacatgcctttcatcccaacactttgaaagcagaggcaggggatctctgagttcaaggccagcctggttcacgtagtgagttccaggacagccagagctatgcagaggataccccatttaaatgtgtgtgcgtatgtgtgtgtgtgtatatatacaaacaatatataatttatatattattttatacattaatacattgcaaattaggtataagcatttatataatattttaatgttatatgtaaataaatacatagcaatataatattatgtatttagtaatataatattgttagtataatattttatataattatatggtataaatatttaatatacataaattataatttttagaacatatgatatatttatatgggctgcagagatatctgggtaggtaaagtaattgccctgtaaatgagggatccagagttcaaatccctagagcccatgtaaagctaggctcagtaacacacgcatctgtaatcagtggtagaatgggaagcagagacaggagaacccctggaagctctgtctcagacaagaggactaacatccaaggttgtcctctggcctccagatgagctgggtggcatacgtgcatccacaatcttatacacgatgtacacatacacattatacagacacaaaaatgtcttgtaaaagtatagatttaatacaggtggcctacccaacactgtggctttgcccacttacatacattagcctaatcattcatgtatttatatatatatatatatgtgtgtgtgtgtgtgtgtgaatacgtgtgtacacgcgcacacacacatacgaatgaatgaatatcctacaggctgtgctgtggtccagctaggccaacaatggctgtctaccttcagaaaatccaagaatccagtagttattcaatccacaagactggatgtcccagctggtcttcactatatgctggaattctaaagaatgtgttaatgcccatgaaggaatggacttcccagcaagaacaagaacaagcaggcaaaaagagggcttccttcttccatgttctgtatataggctaccagcggaaggtgtggcccagattaaaggtgggtcttcccacttcaaatgatttaattaagaaaaaaaatccctcacagatgtagtcaagttgacaaccaacaatagccatcacacctgtagttggtcagaggcactgaataggaggtctgttttgcagtgaaatgtaagaacgtggccttcagtttactgaacattgtcctgcagtggagaaatggtggttacagacatgcctttgcaccaccgtaaagctggacaatagtaagtcaaatctgagggggcccaggcagggaagcaaacccttgaagaataagaatgaaaactcttattggtttggtttggtttggcttcatccacctgcatcagactccaaggagtctaatggcagtgctttgttgctggcatgtttaaaacacagtacagtttgggaaaaggtttcaggcaacaaccagtccaattccaggggcccataaagctttaggtgtggctgcatagaagctcctttgtgaagtacatgtgaccacgagggtggcttctatagctaaaaaggcctagaatctagtgtggtctctgatagattgcatagaggtaagcaggctattaggcacatgtggcatctcccctaaggttaggtttaactgggagctagggataaagggctagggagggaaagtctgggataatcgttctgggagatttggatgaggctgctgccacagatagcacaaaggtcattaatgatacctgtgcccatccctctgggcaggaaaacaggtattttattggagagaggcccctgtgtgtttaacattcccggttctctagtgctctgtgggcacaaggacctccatgatcccaacacaaatcaaaggctttatgctattcatttagatggggcatttcttacggaagaggcagtcaagttaagagcaaagactcagctgggtatagtagtgcatgcctgtgatccgggaacttgggagatagagatgagagactcagaagtttgtggtcatcctggtctatatgagtttgaaattagcctgtctcagggaattaagtcgcaaatttacaaaatgagtaagtaaaaaacacgggctctactattttgagtcccagttcagccatttgttgaacatgatttcagccctctaaactactactgttccttagcctcgtgatagacatttaagggggtttgggggtcactagcctggagagatggcacagtggttaagagccactggctgctcttccagaggtcctgagttcaattcccagcacccacattggtagctcacaaccatctgtaatgggatctgatgccctctcctggtgtgcatgaaaacagagcactcatatccatgaaataaataaaggaaaaggactggagagatggttcagcagttaatagcactattcttccagaggtcctaagttcaattccccgcatggtgattcacgaccatctgtaatgggatctaatgccctcctctggagtgtctgaagacagttacagtgtacataatttatacttaaataattcttttttaaaaataaacctttaaaaacacacacatacaccaacatcctatggctcacctggagattctttgaggtcataggtccatgctgtggctgtggagttgggcagctgctgttgccgccaccacctcttcccccctctttcccctcctccagccatccctagcaatggtaatattcacttccaggctacattgaacaatatttggtgtcaacaagagggcaaatctgtacaattctggcatctgccaatgcatggggtaacttgctatgatgaagaactggctggatcctaatgtcaggaacaccactggaagccgccttggtaccctccgaggcaatgaccttgctgtttggagtttgcttgcttactacctatcagcagaggaaatgccagctccaaaggctgagtgtttccagtcctacccacccaggccatttgcctattcagtcacagcagacgctggagctgtcagatccaggctccagtcccagatgacctgtgtacatatgaccttgggggccagaggcaccacatttcagattccccatcatttatctgaaaataggatcataagtagctgggaaacatgtagtagaagttaatactataggcaccaaggtcaacacagacgtgagttcaaatctcagctacttacttagtgagctttgggaagtgacctcacttccctcacctgtgaaatgggtctgataatccccttcctcctgcagaaagttcatctgggaactaaaggagctgacacaggtgataatcgcttttattgttatccagttcatccaacaagtggttcgctttgattccctgagtaccatcagcgacaaggtggcaaacaaaatggtatcgtgggcagcgtgtctgcatgagtgcgcttcttgtaatgcaggagggtgcccgcctgatgcccctcagcactgatgtctgacacactctgttctctcaccctcttgcagatctgtgccatcatcggcggaaccttcactgtcgccggcattctggactcctgtatcttcacagcctcagaagcgtggaagaagatccagctgggcaaaattcactgacgtcctgtccagcccagtgactgaggaccaggaaccctgctagccctgcctctggcgtcctatctccttctgccttctctggcccagtgtgtgtgggaggagggtgatggttatgggtggcaccaggttccccagctacctctctccccatgttttagataaattaacactgcctggagtcacgtgtctctttccctgcagagccccaagaccagggtcaggcatggggaggtactccagggatgccggtgacctctctgggaaggctgtagtctattctctgttagggaataacttagagtacaaacagataagctttcagacaggctttgacaatctttaagcccccatcatttggacatgctaatagcttgatttgtcccccgggcagccaacctgtgctctcagcctcgggaccagactgcccaaaggtactgctgcttggcgctctcagtatggaatggtacttggcagggacacccataggcccggcactgcagctggaacttgcttctgcctcattgcttcatgcccgacctagagcccggggcttgtctcctaccccagccctgcctcctcctccgggcagatgccagattgcttgacagaacggtggagactcggatttgcccaccagtcctgaggcagctcacgggtgccccttcctctcttgtctttgcttttctgaatcccccaccaatgtgcctcagctgctgtgctatgcggcaatagcatttcttggtgaaggggctggttcccattgcaaagcccccctccccccaacagttacattctgcagtgccaagggatagggccatgtgactggaaggtcatccttggaagaccatataaggcacagtttgtacacttctgtccaaaccagaagcatccttcccaatgaaccacaaatgatcatgtctgacatccacctttggtcccaaggccttagctggggaaatgaagcaggcttctctttccatccctaccttgcagggtcccaaaagatgcccagcatctggaacccacttgctattgagaccccctgttagctgagcacatgccaactcattcttagacccagggggctcccgtgtctcccccacttcctcctgagttagatctctttcttgttccccctcatccttcctaaggggaggggcagtggtctaggtatgaattccatgcagagaattttagctatgttctcaagtccagagagagccgcgggcctgggcttcatttatattgagatggtttgcatacttttgtaatgaaggggtacctgcagtaggaagttttggggttttttgtttttgtttggttttggttttgtttttcttaaatagtctcttatgggtagctggattctctgccatttgtaatttttcctctgattccaattagcaaaacttccctttttatatgagttgattcttattgtgtatgtaaactgcccctggccacttggctagatttcttatcttcttttaaacattctgttccacagtttaagaaaccagtccctttggtgtgtgaatctgtcacctgtggagggttgggcagggtgggatgggacgggaactatgtggcatgcgtatgagttgaaatcccacttttgtgaggacacggtatgccagtttcccatggaagagacgcctctggcctgttgttcttgtaaaggtattcttaaggggacatatgttttgattctttcccactcactgggttcaattagatattaaaaggctgcttttcagaaatattgctgtgactctgccttgatggtggctgggtagcccagagtctagggtgggagtgagagtgaaatttaattctacagaaagaacagcggttgacagtgctgaagagagccaggtgatggcacacgcctttgatctgccttaagctcataggaggcttagccaggcagatctctttgagttcaaggtcagcctgatctacagagtgagttccaggacaaagcagagaaaacctgtcaagaaaaacaagaataataaagccaggtgtggtggcacatgcctttaatcccagtactcaggaggcagaggcaagaggatctatgtgagttcaaagacaacctggtctacagagagaagccctgtaaagggaggacgagcaggaggagcaggaggagggggaggagagaaggtctgccgagaaccaagaaaatcttgcaggatatggttacaaaccattgaccttgaagagcctagttggctttatcccagtcagattatatatgtagagagttgtggaagcttctagagagaggatttcttctaatcaagtttaactatgggtaccttagggggagatcaccctgggaggaggggagcctgatgtgactgagccacgggtgaggcacccaggctggcagtccgttcacccatagaacactagttttactaaagtgtttgctaaaaacaaaagaaccatttcccgtttgtcctcaagcagtagcgtttccagaaattttgagagatctaccctgggatgccacctgtctggaacacagaccaccaagggactttctccgtggatgctccttggaactggatccatgaactgacaaatgtatttgaagttgacatagaacatggaagactgaatcctagccaggggccctgggctgcagtgcttctaagaggcagtggtgaaggggcatcccagggagaggttcaagtgctaggcgagatgggtgtcatcatggaggaaacctgggaagaagggaagtgtaacaggactcagaggaaggaggaagaggggaggtcagtcacggtaagttgcttttatttactagaaacaatgacaggccattagaggtctaaagccttttttaagagaaaaatttgggggtggaggggatggctcatcagggaaaggaacttgctactgtagccgtctttgctactttgtgggttcttttccccaccctttatccccccagtttcccctgctatcactacataggaaaggatagcagggggagacaaagagagatctcaatctatttttttcttgttcctcctttaagcaggactactaacaaagtgcagccaaccccccacaccccactcctgtacaaccaccaaccacctgcactgcctcttggggccctggcatttatacaccttctgaaaagttcccagaattctaaatatcacacaatcgccgaaaccatttgcagccagcaaaaccgtgcctctgctagagcacgaggcaaatcatagctgcttcggacagtcagaagcagcctcgcatcccacatcccccagctgagattaaagtgaaagcacgttcttttatttttgtgttcttaaagaaaccaaaattgtcactacagctaccagtcctgatgacccacatgatggaagaattagccccctcgttgccatggtatataatgtatgaatgtatatacacacaagtaaatacagaaatgaaaaatatttaagggccagtgagatagctggtgtatacgatgacctgagttcaatcccagaacccatgtaaagttggaaggagagagtatgtgtgtgcttccgtatgtgtgccatgacgcttgatcaccctcccatataataataaataaaatttatctttaaaaaattattttaaaacttgttttcgggctcgaggtgtagctcggtgttacaggcctccccccacccccagcacaaagcaacctggtgcatgcttctcgaaggttcgttatctgaagatagacatggtatcgtgcgaatgtgaatgggaactcatgagggagggcattctccgaagaccccttttcctccccgcagctgctccctgccagttctttgctggtgaggtcatgcatttcattccaacccatcactgggaggacttggcattctcggcatgccaggaagaaacagaggcgtaatcacaccctggccacacagctagcaggtggtaaagttgaaattccaacccagatcggcctgactaccgggttctgaggaagcacggggcggggggggggggggcgggggggcggttggtggttgttcctcagccctaacgtcatctgagcaatgtcaaaacagaaagccaaaacggaggagagtcagagcaagagggccttttgtctcttttcttacagttctcatgtggtagtgacctccaaccataaaattgtttttgttgctacttcataattgtaatcttactgttataaattgtaagtgctttcagaagcagagttgccattggggtcgcgacccacaggttgagaaccattgcgttaagccatcctataagaaagtgggaacattacagagtcagaatgcttccacgtctcctatcaaagctctgtgccagctttgtggagatgccgaataatcactacttgattgaacattggaggaaaccagcagcagggacagatctgaatgtacagtagaggaggcaaaataagggagccagagaatggatgaactcactcccatgaagctctgctgtgaggacaactgtgaccctgctgggcacagtcatgctggcacctgcccccaagtctccatagaaacagagagagtgactgatggtaggccccgtggtacaactttaatcacagtagaggcagccgatagcagcctttcccgagcccttctgacctggacacactgacagtgggtggtactccagttgccatggtctctttaaccacagtaggacactttgtccaggtggagccttcctccaaaaatctccaacacaggttgcagaggcgtctagaataaagtactaaaccggcccctgcagtcctcagagctccagtaagactggctttggacaatttatcttccatcttaccaactctgataaactaggactatgtacaggaccagtgtgaagatggctttgggcaagacatcttttctatatctaaaggtctccatttgttaaggaaacattacaaccttgtatctagaatctggcacaaagtaggttttcagtccatgcaccatgaatggatgagtggcagggctagagacgacgaacgaataatactttgcacagaatatcacttgggttcctaagatgaaaacagcagaaaccacaggccctttccctccctcctcactactacagtgctcaggacaggtgcctccttcacagctcaggcaaacccaggaaggaccaagacttcactcccagaggatgcgcagcgtgtctcaatctgacgaacctgcaggtggcgcccgcgctaccagcaatcttccaacagaagagcagagctccggtgcaaggctgaggaggggaaggcaaggacccagaggtgggggggggggggggggtgggcggccatggactcaagacggtgagctggctcttccccaaagctctcactcggtttaaaaaaaaaaaaaaaggtataatacaaaaaatagaaataaacggtagagaaagcacacttcacactgtctcccatcgtggcgcatcgcacctatttccatcaaacaaagctaagggtttacataattgtgattaattttaggagtctgagcgctgagagccagtcctcagcataaaagcctaaatgtgaagagtacgtacggtagatgcaaaggctgacttttggactatcctggagtgagccagcccacacatctgattttcttaggaagattgattagaactgctttgtgccagatgctgtcctgaacactctaggaaacccatttaattctcacgacaacctactgagattatacctactctacagatcagagagttaggactataaaactgacagttcccatgtccagcaagaaagacacacttgggaccaggtatggctttatgagccaagcaagggctaaacaaacaacggaggggttgggggcggggggacatttagggagaacattggttctccctaaaattcttggaaggtgagagaacacttttttaaaagttcagatttgagggatcaggaagtgtaagttagtggtaaggtatgtgtttaatatgttgttataagttcaatctctagcatcaataaattacattttaatttaatttaaagtaatgcagatataaccctgaccttccaccatgtgtttttatagaattgtatgcaataggacccaaatttctgcatatagaacttcttagtaattctgaagaagccagtcagatggcttttgaaaggtgtgtcatggtgtttaaagaatttggacaattacaatcagcctgtcacatgggtagggttcacccaaattaaactagacacaagtagaaaatatttagatttttttaaaagttcatctatactgaatatgtacagatttttttttcttttcatgtcctaagcaatacagtatcaaaactcatacagcctttacagtgtactagttgctatatctagatatgattatgcaggaggacatgcataggatatacatatacatatatatgccaagtgaacattatgatggaatggacttgaatagccatagatggaggttctgtgaccaggatgctgagagcaactgtgcagtatatatctgttaagtttaaaccctgactgaggtacctacttaacatattacagtgcacctggcctccaggttctcccagcacccctcaggatgctttacatggtatggctggcaagccctgccctctaccctgaaatcaagctgtgctgcttccccccagagactcttccctatataatccagacattctggttacccacccttcctttttgtacctttggcctcccgactgctgcacttggttcctctctctcccttcctcttcccctttccatcttcccatggttcagggtcagttctagcctggactcttccagctatgtccgcctctggctatgtctcccttttatctacaataaactttctccttcactgttcctgggagcagtcatgtccttttctttcctttttcatttttctttctttttctttttctttttctttttccatttgaaacccatgtaatttctacagactcctttgtggtgggaaagggggggtgaagtttgggggtgaggtgtttgggaatggagagaaactaaaaagacatcatcaaggaactggggctgcatgtggctcagtgataaaagggttgctgggaaataggaggtgggtcttcgtcttgataaaaataatttttgttaaaatggactcaaaaagaagttgagaaccatcttgtgggctgtaaatctcagctgtggcagccgggaggagagatgtaagaaaaggccaagaaaaggttgcaggctgggcaacggaggtctcagagcagcttgtgcgggtgtggggtaaatgggtgagggaagagctgtcttctgggaataatgcccgaggtgtcatggcaagcaaggtgggcttttagcctagtttactgggcatcctccctttcctttgaaattttacattttaaagaggggcaatttgcagtgcttctctatcttaaaatgggtgtgtcatcaaggaagcaggaggtgggaggccaagcagatttggacagagtccatcctcagtggtatccgagccggctaatgcctgtcgaagtacccaacagatatatcttggttggttggctgatttatgagaaagggtctcatacactccaggccagctcttaacttttgatcctctgggctctccacctccccagtactggaatagtaggaatgagacaccaagccaagctagaaagggtcccaaagccctgggttcggtccccgacacaaaaccagaaactgaagccagagaagcatcgatgagcttctgtttcaggccctacaaagcggttccattaggggctccagcctgaggtcctgcctactccgctacacggagagaacatgccgagactcaactccagccgcagggggcgctgttctgctttcctgaggcaggaagcgcagactcgcgtcccttctgtgcttgagctacaagaaatgtcatttccgggcctgcaatgcacgccaccggaaccggaaccggtgggtagtagtggttccgccaggacccagattgtaggcagttccatcccttggtgacttcggaccgcagcataaacctcaaacaccatctctatgccccctcctacatgctctgaaagaccttgtcttcccggctgtccaagaaactgcggcagaagtagagcgtctgctctatgcccattcgcaaggaccaggtacatccaaaggtcctcgagttctagttactcaagggcgtatagctcatgcacctcgttatcatgaaatcctgcaggagtcacataccccgagacctcagcaaggcggcagagtgactgccgacaagctagaccagagccactacagtgcattgagtcccctttgcccttatcacaagcagactgtctccaggtacagatctgaccattgttttagggaatgaagtgagataaagtgaggggctttgcgtattggatggacatctgatggttgagaggtaaattagtaaaaaatataacgagtgaagtggaaagagtggcgaggccagtgataggcaggccgggctgggcagttccgagtgcgcactgctcttacagagaaactgagtgtagcgcccagcgcccatgtctggcagcgtacaactgcctgtaattccagctgcagggagattccatgccctgggccctatggacactgcagtcatgtgacatacagacgtatacacatcattatacataggcctttaatcccagcactgaggaggcatacaaattaagtttgaggccggcctggtctacacagatccagttccaggatagtcagagctatatagagaggccctgtcttgaaaaaccaatatgaacctgaaaatgtttgccttatataaaggagaacgtcaagagtcttcaggccaccgcaaccttgcaaatcgctctcctttgcaaacaagctggaaaattcatattctcttctttctccacatatccttcctgctactgctctgttcctcatttcatagtccggtttctcaaaagagtcgtctccacctgccaagcatagtgatctatgctttaattcctggcactcaggagataggagcatgagactctctcaggccagcctggtttacagagcaagttccaggacagcaaggagacattgtctcaaaagacagacagacacaaagagagatagacagagagaggactaccctgtgttcccattcactcgtggatgctctccagtctcatccctgtcccagctgcttaggctggggttatcagtaacctgtgtggctaaatccagtggccacattcattggaggtggcaccaccacctccatataagcatgcttatgcttacagttgctggcaacgtctcagactccttttctgggtatttctctcctctgatccctgactcctggagttccaggcctgggtcccatctattatttttctatctatacacatatatagccttctattctccaggcttaagagaagtgctctgtggtagcagtgccccagtttttggatttaatttgagacatggcatcactatttagcttaagttgcggtttctgtttggtaactgtgccctgctgctgagacacgggctcagacttctaaagcactcttggtcctaacattcctgctgcttctaaaatctgattttcttctcagcttctatatcttagtaagtgacatatctcaccagatgtcaagacttgacatgacaactcagccctcacagagtgggatcatctccctgtaatcccgacactcattgtcctattgtgacaaaagcctttgtgtcagcttagcaactcctcatatctccttttctgaacagaaatggtacttgtgtatttcctcgttaactcttttctgcctctcacactttagttctgtgtgccagagagccatcttgtttgctggctgggctcagtccagagcctggcccccaacagagctctgtcaacatctgagtagggaaaaaaaaaatcttattaactagatgaatataaaaggtatggtataaaggactttacaatatatgtttacacatcacctagatgtatatgagttgtgttttcttttagatatgaagaaactaaaagtcaggttaaataatacagaacatgtagctgacgatgacgtcagatttatgatcttcctgagtgctgctggacttacaggcgtgtgctgccatggtagacctctgcagtgccaggacttgtgagttgtaagcaaacccccaccactgctgtcttcactcccagacgcagggtaattttgtggttgtggtgctggtctgacctgagacatcaggcaaccaaggaacaagtatacagcacaaaaaaaaagctagctctggctgccaagactgttttgttcagaagtttatatgttcagcccacgtgttcctgacagcttcctccgtgtgctgtgctgtcctaggtggtttgagaatcctacaaaggttagcaggtcagcagggtagtcctagtgtacagaaaccagtaagtcatctacatcaatcgggtacagcataagaaggccaagggcacagctgtctacgtggacacccaacccagtaaggttgggttgacatggctgggtgcacatgtcagagctttctgaacaggtggtcatgtccaagcaggcgtagtggcatcaacaagggactacagcagcagtttgcaacctgtgggtcaagatcccacaggggttcatatcagatagaaatatgaccattcataagaaaagagttatgaagtggcagtgaaataatttaatggctggggtctccactacatgagaaactgttacagggtcgcggcatttgaaaggttgagaaccactgttttcgaggtgcttctgtcttgccattcttgatgatgctgtacccccaagtggatggcaagagggcccacaaattctaagtaccactcgttcactaagaagagtcccgagagagaacagggcagagctctcttcctgggcctccccactcagctaagaagcgctgttcacctgttcactctcatttcacatgctggagaagctttcttctctgagcgtcagctctataaactgcatggttagggtctcctcttcttagttcctgaactgttatccagtagctggtgagaatccagatttttttttccctaagtatcttgccagccagcgctgtaagcaacgtttccatcccttcaccgagctgtggaaacctcagagaatccagggtctcgaggctggctggcagggggaacccaagagaagggccactgctcaagattatggagatttacattcctcccacttacagctctgtgtcgtctcctaacaggcgattgagctttaggagagatgcgaaacacggtcgccctgggaagtcattctttgatcagaatgcattaaacagattttattcctttgcatgctgcagtggaacacggggccttgagtatgtcagacacacgctggaccgcctaactccacctcctgttctccctggatgcaaagcaacaactgataggcatggaggcacacaccgttaacgttaacacccaggcagaggctggtggagctttgagttcaaggtcaacctgagagacagtatctcaaaaaaaaaaaaaaggttaaaagcaagaagtattcttttttgttttgcttacttttaaatcaattactgtgatttttacattaggtctcactatgtaaccctagctggttggtcttgaagtcg

SEQ ID NO: 157 - DNA, 2683 bp, Mus musculus
cacgcggcgctgcggcccgcctggcctgcaacgctcccaccggctcggcggcacgatgccctttgacttcaggaggtttgacatctacaggaaggtgcccaaggacctcacacagccgacatatactggtgccattatctccatctgctgctgcctcttcatcctcttcctcttcctgtcggagctcactggattcatcacaacagaagtggtgaatgagctctacgtcgatgacccagacaaggacagcggaggcaaaattgacgtcagtctcaacatcagtttacccaatttgcactgtgaattggtcgggcttgacatccaagatgagatgggcagacacgaagtgggccacatcgacaattccatgaagatcccgctgaataatggagccggctgccgcttcgagggccagttcagcatcaacaaggttcccggcaacttccatgtgtccacacacagtgccacagcgcagccacagaacccggacatgacacataccatccataaactctcctttggggatacgctacaggtccagaatgttcacggggctttcaatgctcttgggggagcagacagactcacctccaaccccctggcctcccatgactacatcttgaagattgtacccacagtgtatgaggacaagagcggcaagcagcgctactcctaccagtacacagtggccaacaaggagtacgttgcctacagccacacgggacgcattatccctgccatctggttccgctatgacctcagccccatcacagtcaagtacacagagagaagacaacccctgtacaggttcatcaccacaatctgtgccatcatcggcggaaccttcactgtcgccggcattctggactcctgtatcttcacagcctcagaagcgtggaagaagatccagctgggcaaaattcactgacgtcctgtccagcccagtgactgaggaccaggaaccctgctagccctgcctctggcgtcctatctccttctgccttctctggcccagtgtgtgtgggaggagggtgatggttatgggtggcaccaggttccccagctacctctctccccatgttttagataaattaacactgcctggagtcacgtgtctctttccctgcagagccccaagaccagggtcaggcatggggaggtactccagggatgccggtgacctctctgggaaggctgtagtctattctctgttagggaataacttagagtacaaacagataagctttcagacaggctttgacaatctttaagcccccatcatttggacatgctaatagcttgatttgtcccccgggcagccaacctgtgctctcagcctcgggaccagactgcccaaaggtactgctgcttggcgctctcagtatggaatggtacttggcagggacacccataggcccggcactgcagctggaacttgcttctgcctcattgcttcatgcccgacctagagcccggggcttgtctcctaccccagccctgcctcctcctccgggcagatgccagattgcttgacagaacggtggagactcggatttgcccaccagtcctgaggcagctcacgggtgccccttcctctcttgtctttgcttttctgaatcccccaccaatgtgcctcagctgctgtgctatgcggcaatagcatttcttggtgaaggggctggttcccattgcaaagcccccctccccccaacagttacattctgcagtgccaagggatagggccatgtgactggaaggtcatccttggaagaccatataaggcacagtttgtacacttctgtccaaaccagaagcatccttcccaatgaaccacaaatgatcatgtctgacatccacctttggtcccaaggccttagctggggaaatgaagcaggcttctctttccatccctaccttgcagggtcccaaaagatgcccagcatctggaacccacttgctattgagaccccctgttagctgagcacatgccaactcattcttagacccagggggctcccgtgtctcccccacttcctcctgagttagatctctttcttgttccccctcatccttcctaaggggaggggcagtggtctaggtatgaattccatgcagagaattttagctatgttctcaagtccagagagagccgcgggcctgggcttcatttatattgagatggtttgcatacttttgtaatgaaggggtacctgcagtaggaagttttggggttttttgtttttgtttggttttggttttgtttttcttaaatagtctcttatgggtagctggattctctgccatttgtaatttttcctctgattccaattagcaaaacttccctttttatatgagttgattcttattgtgtatgtaaactgcccctggccacttggctagatttcttatcttcttttaaacattctgttccacagtttaagaaaccagtccctttggtgtgtgaatctgtcacctgtggagggttgggcagggtgggatgggacgggaactatgtggcatgcgtatgagttgaaatcccacttttgtgaggacacggtatgccagtttcccatggaagagacgcctctggcctgttgttcttgtaaaggtattcttaaggggacatatgttttgattctttcccactcactgggttcaattagatattaaaaggctgcttttc

SEQ ID NO: 158 - protein, 308 aa, Mus musculus
TRRCGPPGLQRSHRLGGTMPFDFRRFDIYRKVPKDLTQPTYTGAIISICCCLFILFLFLSELTGFITTEVVNELYVDDPDKDSGGKIDVSLNISLPNLHCELVGLDIQDEMGRHEVGHIDNSMKIPLNNGAGCRFEGQFSINKVPGNFHVSTHSATAQPQNPDMTHTIHKLSFGDTLQVQNVHGAFNALGGADRLTSNPLASHDYILKIVPTVYEDKSGKQRYSYQYTVANKEYVAYSHTGRIIPAIWFRYDLSPITVKYTERRQPLYRFITTICAIIGGTFTVAGILDSCIFTASEAWKKIQLGKIH

SEQ ID NO: 159 - DNA, 138627 bp, Homo sapiens
  misc_feature (1)...(138627): n = A,T,C or G
aaaggtcagttctggctgtggtgttggaaacaggctgaaggcgacaacgctgaacacagaaaaccagttgaatagcaatgcctgacccaggtgagatatgatgatggcttatatcaggacagcagtcatgtgaggtgattaaaagggctcagattctggatctgaattttgaaacccagggagactgacatcagagtcagggtctgccacagtttgatgaccctggtaaacctccctagcttgggcggtgaccctgaaagggctgtaccctagaagtaggggtgaaataaacgcaaactagtcctgagcttcaggtcatctgggtaagctagtacatttcagcctctgaacttgaaataaggtgatcctagaatgctgatttgctccaggtgcctggagaaagggatttttaaaaaaatcatcccaggcctaaaattatttttataaatatttttccaaatacagtatttttttttttagcgcataatcgaagataaccagatttcatgaggggaaaatacaccatgaatggtaacaagcagaaatggatctcaaggactccagacatggaaattatcagacactgactgtaatataattatgcttcctatgtttaaggagattaaaagtcatgcctgaaaattctgtaaggagactggaaactatacaaagtaactgtgtcagtcatgtctagtcctgaatatgatggcataatctaggtggttagaggggagtttaactaagcgatgcttttatttttattttcatcattttttgagacaggctctggctcagtcacccaggctggagtgcagttgcatgatcttggctcactgcaacctctgcctcccaggttcgagccattctcatgcctcagccccccaagtagctgggattacaggcatgtgccaccaggcccagctaatttttgtatttttagtagagacagggtttcaccatgttggccaggcaggtctcaaactcctgacctcaagtgatccacccatcttggcctcccaaagtgctgggattacaggcatgagccactgcacctggccagatgcttttaacagaatgaaaagagtatagggaaactacaagagatactctagagctagtaccctggagtaagtaacagtggagtgctattactatcccaaggcctgaaggggaaggagaagaaatggttactggaactaagaagagtggacctaggtgaagagtaccacctggtagaaattatgatgttcactgaaggacacggtcaacctgggtgaccactcagggcagaagctgggcaaatacataccaaaacttcattcttctccttccttccaatctactgcaggtactccccacaggctgaaatcagccagaagccaaaaataaggagccatcaaaacaggtcaagaaacctcccagcacacagaaaagggtgaagaagcagagttattctggagggacaaatagaaggcacctggcacagtgaagtcacatatttgaaaaagaactaaacacaaattccaaaactgggaaatacaatgataaaattaataattcaatggtcaggtttaatagcagattcaatacaaccaaagagagaattagtaaactagaaaacaggtcagaagaaactatgtaaaattaacagagaataaaagcaagatgagagaagagagataacggggcaaagttaatatccacaaataagtagttggtaattttccagggcattgagaaaacatcaatccacagattcaataagtccaatgaacctcaagtctacactcatactcattatagtgaccctgcagagacagagaggagtcagggatgatggtaaggataacaggcaaatggaaactaatggagttgccctggactgagaggaaggaaaatttgggaaatttgaggaattgtctgcctggcccctgtaagcccttgtgtttgagccccctagtccccggatcttctgagtagttctactgcctctagacccattccccactcccactgacttgggcctactccccttctcttctcaggagattgtagcaacctcctctttggcctcccactccagtcccttctccacattggctgccagagtcatgcttctaaaaatggcaaatggttggtggtatgatgtggcctaattgtgggtgatatacttctttcctactgctctggtttctacaaagaaggatttcccctcaatactctgggctcccctcaagccccaccaggtaagatggatgaattctgactggtgagtgtgggactggagtctgacatggtggtgctcagctcttcctttcttcttccttttgggagaagaccacccgcagggagctgcattttgctctcccctccccaagaaggcctgtactttttctttgctttttatgcctcctgtgtgggtctgtctgccaaattctgaggttcaccattaggaagccctctgcagatagaaatcacatttgttcagagcattggcagaaaagagaaactatattgggttccccaaaacccccaaaccaaattattgcaatacatcctaacttaaaatgcttcagggcctctaactgcctactagagaaagttcacatttttaacacagccctcaaagtccttcaccatccagcccctacctctccagcttgatattagcccaggctgcatccatgctgtcctctctcccaccacccatgttatttggatccttacccagtatgtagccagtcccttgaagactactttataaaaggcagactctctttcctaactcacactggggaagtcatatcatgagcagcattatggagaggtccatgtgagaaggactgaagcctccagtcaacagccaagtgagtgagtgtctatccctcacctccagtcatctgcagagtctgtagccttgaccgtgccagaaccacccagctaagctgctgttggattcttgatcctcagacatgggggcataataaatatatgccatggtttaaatccatcacccaaattttatgtattagaaacttaatcccctaattcgtgttgatggtatttggatgtgggggcctctggaaagtaattcggattatataaggccatcagggtggagtccccctgatggtactggtggccttataagaggaagaagaggtcaaactcggtggctcacatctgttaatcctagcactttgggaggccgaggcaggcggatcacctgaggtcgccagtttgagaccagcctggccaacatggtgaaacccccgtctctactaaaaaaaaaagaaaaaggcaaagagaggcctgagctgacatgctcatgccctcttaccatgctatgccctccaccatgttatgagacaggagaaaggtcctcaccagaggcagcccctcagccttgcccttcccacagcccccagaactgtaagaaatatatttattttccttataaattccccagtctgtggtattctgtatagcaacagaaaatggactaagaccttgtgtattgttttaaagttttaaattttgggtaacgtgttttgcagcaatagataactaatgtacccagcctgcttctctccccttgactaacttcttcatcaggtctcagctcagactcttcctcctcccagaagctttcctgactctgtccaagacacctgatggtttagcctcccaatacctccttctctggctgcactgcccagactcttctttagggaaccactcttcttccatctgagtctgtgtgtgtaggatgagggtgactccaccccaggtttgagggcctggctgccagcctaggcctggccaatcagcactctccaaacccctggagccactgtttaggctgtgacctaagccagacccttgggggtcagcccaggagcctttcaggaggtacgggggaagtggtaatctttatctcctggcattgctgagtgggaaaatatcagcctggagctacaggcacacattttgccagcacaaggggaagcctgcctcaagacgaggccagaggaaaacaaagaagaacctggggatgggaagagacagattcctgatgcaattgttgaagtgcctgtatccaactgtgcctgaaatccaaatctacctctggacttttggactttaatttttcttttttctttctttctccctccctccctttcttccttccttccctccttccttccttatctttttcttttttttttttgagtgccatagacagtgtgtgttgcttttagatgatttctgtcactttcagctgaaagagttcagaccaattcatccccacgggtggaatcagggactccctctagactcccagatcctctggtaccacccttgtcactgcacttatcacaaaaaactgcaccagagatacgtgaccctttccctgtccctgatttttttgtgatggtatcacacttttgcttacctcctcccttcttttttgaaatttgaggtatgtcaggttcatttctacatccagagtatctgcctaaaagaggtattcagtgaataatggtataatgaacaaatacaagaaaggatgaatgaatgaacacacgagtgtcttctagttggtcaagagactttaatagagtgagaaaggagagttgtttctccagagacctacctgctatgagatctaagttacactaaagtcctctctgagctgacaaaggattattatttttaaatctctcttcacccagaccacagctgaaccggccgcacccatgggacacaaacccatctcccattacagaaaaacaaatctgacccagccattctctgcttaaaacaacttttggtgatgttttggacgggagtgggtggaagggagtgaacatttggattcagagaacattcggtgttatagaacattcatttgtttattgactgactcattagacaagcaatgaattagcacctactatgtgtgggcactatacatgttactccatcctcacagcaagctctgtcttaggccaatgtatttgttatctgctactgcataaccaattaccctaaacctaggggctaaagcaacaaacatttgttatcacacaggaatccaggtgcaactcagctggctgcctgtggctcagagtctctcacgaggttgcagtcaagctgggggccagggccgtggtcatgtcaagcctccactggagcagaaggatccatttccaaattcattcacagggttgttgtcaggccttagctcaaccttgtccaatgtgtggtctgcaggctgcctgtggccccggatggctttgaatgcatcccaggacagctttgaatccagcccaacacaaattcttgaactttcttaaaacattatgagattttttgtgatttgttttcctcatcagctattgtttgtgttactgtttttttgtttgtttgttttttgagatggagttttgctcttgttgcccaggctggagtgcaatggcgcaatctcagctcactgcaacctccgcctcctgggttcaagccattctcctgcctcagcctcccgagtagctgggattacagacacccaccactacacccggctaattttttgtatttttagtagagacggggtttcaccatgttggtcaggctggtcttgaagtcctgacctcaggtgctcggccatggcctcccaaagtgctgggattacaggcgtgagccaccgcacccagcccgtgttactgtattttatgtgtggcccaagacaatttttctattttttttttttttttttgagacggggtctccctctgtcacccaggctggagtgcagtggctccatctctgctcactgcaacctctgcttctcaggttcaagcaattctcctgcctcagcctcctgagtagctgggattacaggcatgcgccaccatgcctagctaattgtttttgtttttagtagagacggggtttcagcatgttggtcaggctggtctcaaactcctgacctcgtgatccacctgcctctgcctcccaaagtgctgggattacaggcgtaagccaccacgcccggcccctaagacagtttttcttcttccagcgtggcccagggaagctaaaagattggacacccctgccttagaagaatcacttgcaaactcacccacaggggcttttccttagggcacagaagccacacacagaagccagcttatccagggtgactgatccaagagatagcaagagagtgtccaagacagaagtcaccatctcttgataacctaatctcagaagcaacatgctcatcacttctgccatattttgtgcattagaaatgagtccataagtccagcctacacttgaagggaggaaattacacaagggtatgaataccaagaggtgggttaattgggacaatttcagaggctacctgccacaggtaaggtattattatccttcatttcatacctagacacccagctagttaagcaactggtccaggtcacccagcagagagtgatctgagtccaaagtggttttctatttccccaggctggcggggggtgagatggaggaaggcagggagaagttactggtaggaaaaaaaaataatgaggatggagtctctgttatttatctactgctgtgtaactaattacccacaacttaatggcttaaagcaaacatttattatcttatagtttctatggatcaggaattcgggagcagctgagctgggtgtttctcagggtctctcaagaacctgtggttaagctgtgggctggggatgcagctttgaagccctgaccggggctgagccgctacttccaagagagcccactcacatggctgttggtgggaggcctcattcctcaccgaccaggcccctttataatcgtgcttgagcctctttaggacaggcagttggcttccctcagaacgagtgattcaagagtggctaagcagagcctcagtcttttgtgacgtagccacaggagtcataactgtcgtttctgcaatatcctgttgattacacaggataggtcagccctattcattgtgggaggtgattctagaagggcatgggaataccaggagatcagggtcactggaggctggctacctaccacaggcttccacaagattgataatccgaaaacttaacttgtattgttgttccctgctcaaagagacccagagccttcccacgtactgcagacacaatctgattttcttagctccatctcccactggctcttgagtggatggaccatctgggactgacagcctggtctgctcacagacctcaccagtcccacagcggaggcccatgttgatacctcccctcccatccgctgttctgttggtaaggcctgcctccgtgggaaggcctgcctccctgggaagcctctattcaaacttcaacgcatagttagtgcatccccagcatgtgcagggtctggctggatgctaggatatgatggtgataccaccttgtctcagggaactttcctttttttttttaaattatactttaggttctgggatacatgtgcagaacgtgcagttttgtcacacaggcatacacgtgccatttgtgtatggcatcattgtttgtgtacccatcaacccgtcatctacattaggtatttctcctaatgctatccctcccctagccccctaccccccgacaggcccctctcagggaactttcactcagatggggtagtagttactagcgaattaataataacctaatcacacgtcatgcccagttctcccaaggaaacctacaaggtaccatgcgattatgtaataggggactggcctagtccatgagcattggggcagtcaagtagctagccaggctgcataggtgtatcagcattgggtttaggtgtaagtgtctgaaaatacagaataacaatagcttaaataagatagatgtttgtttctcttgggcaggtgtttgaggacaggtattttgccacttagagacaggaactcaggtttttttttttttttttgagacagagtctcactctgtcgcacaggctggagggcagtggtgtgatctgggctcactgcaacctctgcctcccaggttcaggcgattctcctgcctcagcctcctgagtagctgggattacaggcgtgtggcaccacgcccggctaatttttgtatttttagtagagacagggtttcaccacatgttggtcaggctggtctcgaactcctgacctcaggtgatccgcccacctcggcctcccaaagtgctgcaattacaggtgtgagccactgtgcccggcaggaacttaggctctttttgtcttgttgctctgctctgtggtggcctccaccttatggtccaggatggtgacgcctacattcctggcagccagatggagaaagggacacagagggtaaagcagacataccaactatcccagatgccccacaagacacttccctttacttctcaatgccacatctagctacaaaggaagctggggaaatgcaactttcactgtgagcacccacatgcccagccaaaagttgggagctctatccccactcgaaaagagcaatgatagtcaaccctgtcttgcatttactctgtgccaggcatttgctgaccttggatatcatcccaaatgcacacttgattcagtaggtctggcctggggacaagagtctgtcctgtgatggccatgtggctggtctgtggaccacagtttgaggagggaggattcgaggtcaaagatccatcattgcatgtttcctcccacacagggccaacgaatggctgtttggaagcagtggctgctcaaggccccttaactctccctgctgtccctaggtttccagttcaggctgagatttccttttctcccccaacagtgtcagaccactgacactgaatgaatgaatgaatgaatgaatgaatgaatgagtgaatgaatgaaaagggaacgcagaggtcaggtcccggcatatgctctaggggaaggctttggttcaccacgtcaccctaccccagaccccgtgctagtgttgtcccttctgaatcctcccggaggaaccagcactgcggttcccctctatttacacagggggaaactgtccattgactctgcttttggaacccgagccctcaccattctcccctgggttttttgaagccctgtcccaccacaaccttggagaaagggccagtgacagaacctgggggaagttcagagtgagtttcccctactcaggtcttgtgtgacctcaactaccatctcctctaatccagcagtcacggaggcagctgctctgtattcctgaggaggaaactgaggctctaagaaggagacaatcggcacagtccacgttggccaagtcacagtgcaggtcccatctgcctctgccacaaccctgcatgttctcgatggacctggttcagagcagatgctctgtgaatgcccactggagtgaacgacaggggcagatggaagcagggacagccactgccagcctcaatagtttcaggtgcctggcactgtgctaagccagtctcctgtttctcagctgatccccaggaaaaccccctcaagtaggtgtcatcgtcctctttgtgcagatatgcaaaaggggcggggcgggggggggcgctctgagaagcccagtggctttcccagagagacacggcaggggcagaggtgagtccaccttaacagcctaggatggccgacctcttcccttcccccacagtattaggccctcactcagagctagacgctgtgcacggccaaagtctgtatcaccccgccccccgcccccaactcaatcacagttcagtgaaactgtttacaaatgcaaaaaactgggctcggagaagcagagaatttgtccgagggcatccaaagagatggagaaggaaatctaagtgggaggcttgaaggaatgagtactggagtctttgggggactcccttcccttccgacagcctcgactctccgccccttccctgcctgcccgcgggcccctttaaccgggtggcggaaggggcggccgggcgggcggcgcccaatgggctgcgcggagcgtcacttcccggcagcgggaggcgagtggcgagtggcgagtggcgagtgtcaggggggcggccggcgggggcggggcggccggaggaggcgttggcagcgggctcggacccacgcggcgccgcggcccgcctggcctgcagcgctcccacccccggcggcggcacgatgccctttgacttcaggaggtgagtgtggcgaccccggccagtcgggagttccctcagcgggcagagggagcgccccggcacgccgcggacccctcccgccctgcatgcaaaagcggctccccgccctgtgcatgcctccgcaggcccctagggaccccaggcgagccccccccctgccgcacacgaagccagccagagccgcggaggccccctcgtgcagcgggagacaaatccacccaccttccctccgccgagccccctccccagcctgcccggataccttgcattcccctcccccacactaggaaacatttcctccctcctcccagatgggaacagcccataacaccccagcatccctctcctccctctactgagcctccttggtggaccccacctcagctgacaggtggggcagggcacctggaatgagtccggaggggcctggggccccatgcagcctgccggcagctggagggttttaagtttctatagcctgaggctcccccaggccgggcagatcgggaggcctgcccccgcccctccctccctcagccccagccctgtccgctgggtatgggggcaccatgggaaggggaggaggcgccttgggcaggactctgcagaagggccaccggggtctggccttggctttctgcagtcaccacaatgggtcctttgtggggtccagctgcctcatggtctaggttgcatggggcattctggaagcctgcgggggaagagatctccaccagaggttcccttgaggtgtggagccccaggggatgtcctggcctgaggcagccacacttggtgtctggctgggaaaagagcagggctttaatgcagggaggagctggattagaatcctggctctgccctttctactgaacagctcggtatattctagaagttaggggcaaaggctctgggttcagaactccctgtcgccgctcggctggctgacctcagcaagtctccgagcgccctcagtttcaccacctgcaaattggggctaaaaataaggtctccgcttgtgacgactgagtgcgtgaaacacccttagcagagtctggcatgatttagagctcagaaatagggcattagtggatggggggtgttctccaggaggggttttccacatccacaaaatagtgattcagatgcctgtgccacaggaggtatttcttcccctcttcttgcatgtgaaggcagtgtaaagtgacagtctacccagagagaaaggcccttagcttgccatgacccccatagcatgggatatattggggtttaggcccaaagaggacactggtcttggacctcttgattggttgacatggttttccagcctgtccgggtccctgataccagctagcaaatgtttgccggcttcttgcccctgccgggcagccctgaggctagcagacctaggcagttttgaacaaggacagcccctctgatggaattcaaggtcagtcctaatagcatcagttaagtctgggccataagagctgtggtcggcacatcaatttctggttccacaaagcctccccttacccaggccaaccatagggattcgtgccaccgccgccccctgcccctgtgtgattcagtaggttccggtgattttgagcttgctggggaaattgctgtttttgatcttttaatcctttctccctgcacctcacccttccgtcttaccaaggaggaaatgaggctccagggatgagggccttatcttggactttatgggtgctaaatgggaagggtagacttaggtctcaggtcacacatggctcccaaccttgtgctccttgaattggtggcttgtgggggcaggtaagggaagtaaggaaaatgggtaaggccagctctagcctttggccttggaagggccctgtgtcaggcattgatatttaaagagagaaatgctcagctctgagaagctggctagtctggggctcccttggcatacttcaggtccctgagtgcccaggtgtcagggggcccagcttaactaggaaatactctcagggcttgggctcactgcggaatggtgagaatggattcagtgcttcacgtttgcaccttggaggatgagccatgtgtgcccagcaaacctgcactctttaagctctgtgaacttcaaggctccaggacctgggttctactgagggttcgaccatccccatgcaccttcctccgcttcagtgtgcattcatcaagcattcatcaagtgtccagtccatgctcagccctctgccacaggccccaccgtgaggaggtgggtggcatgtggtccggctctctttgcattccaagagaagggaggagggcttatggggtcccaggagtgggggtgtgcgtgaactggcacgcaaggagcatctaccactgtatacacactttggggtgcagacatcgattcccttgtcacctgagagagggagttttaatcttcattttaaatcaaaggagaggggagctccactgagtagaagccctttgctctggccatgcagtgcatgagctggtggatctgggatttgaacttggggctgttagctccaaagccttagatctgggagaaaagggagagattggaggggcccaccatcctgtcagctcttttaagaattgtggggagtggagaggggtataccgtgattagacctcctcccccagttcaaggccagggagaaaaccagccgtcctgctcgtgttccccttcttaaaatcagaagcaggaaaaatagtgcactcttgcccttccctacggatacttctgattttcttactgcctgtagagcctggtgcaactgagttctgtgttttcctgtctgtgaaatgggaatgaggagagtactcaccgaagtagaacagttgagggatgaggcagtgcggaaagcatttagacacagagtaagcgcctcatccattttggccgccatatttatttgtgtcattttatttaagcacccatcatctcctaacacattatataattcacttaattatcatgctgcttctctctccctcccattagtacatgagctcctgagggcaagaagtttttatcaggcttcttcaaggttgcatctccagcacctagaactgtgcttgagccaaactcgatccttggagatgcctcttgaaatctgtcaaggaagccatagacatgacgtgacttgatatgccagcttcagtgggcagattttcagccattagtggagaaatctcccctctccacccttgaatctgccgttcctaggttgtttttggggttaaggaaggaggcagaacgcaggggagggaggctgagctttcaatgatttattgtgtttgctttgctcttgttaaattgtttcactaatggctggctgttgcagttgtggaactagccttgtgacccacatccgtgtgtgttgtttcgagttccggctggcctggggccagtagcacctgctgccttctgcacaccagcccagggtgggtgaggagggaagataacagcatccggaagccctgtgcccaggcccagtggtgcctgagcactgccttccgggaggtgcaggtggctgctgtcccacagtgacagcccccatgttgaaaacccaaggcctcgggggtgccgctgcactggcactgaccagatgtgctctgggaccattgacttcccctctcggagcctccatttcttcattttaaggaggggatgtaaacttcgctgcctcacctggtagagtagatgtaggggcaagtgtgatcaatgcacacttgcaggatcaatgtgcaatgcaacttgcaatgcaggatgaggcccataatttgtggggcccagtgcaaaatgaaaatgtggagtcccttgttgaaaaagtattaagaatttcaggacggcagcagcagcgcattcagccaagcatggacccccctctgagtgtgtgaccctgtgtgcctgcacaggtcatgcggccctgatggggctggccctgctgcagggccttggtttggcctctaccatttttcactctggccttctgagtggtctttctccctccaggataccccagacctcctcaggactccctagtgagctttccaaagttgatctgatattttcatgtcctgatttcaaccttcaaatgggtctcattgctctaaggatccagtgtgaattcctttttaaaaaaaaattatatagagatggggtcttgctatgttggccaggttgttcttgaactcctggcctcaagtcatcctccttccttggcctcccaaagtgctaagatcacaggcatgagccactgcacctggcccagtcttaattccttaggccccaatagggaatgggaccctggtagccccatcagttcctacaccaagctaagcctcagccaccacagggacctctgagcacagagttaacattcagcagagagtagctaacatgaatgcctgtatttctaccctgctgtttcttccagaaagaattccaaggaagctgacaagaacatatactttacagcaagttttaaaaaatataaaatgagcgctgtggctcatgcctgtaatcccagcactttgggaggctgaggtgggcggattacctgaggtcaggagtttgagaccagcctggccaacatggtgaaaccccgtctctaataaaaatacaaaaatcagccgggcttgatggtacatacctgtaatcccagctcctcgggaggctgaggcaggagaattgcttgagcccgggagacggaggttgcagtgaactgagaatcttgccactgtactccagcctggccaacagagcgagactctgtctcaaaaaaaaaaaaaaaaaaaagtatatatatatatgggccaggtgtggtagctcacacctgtaatcccagtactttgggaggccgaagtgggaggattgcttgaggattgcaggagttcaagaccaagctggtcaacatagcaagaccccagaccccatctctatggggaaaaaaaaatggccaggtgtggtgatgtgcgtctgtggtcccagcttcttgggaggctgaggtggaaggatctcttgagcccaggaggtggaggcttcagtgagccatgttcatgccattgcattccacactgggtaacagagcaagaccctatctcaaaacacacacacacatacacacacacacacatacacacacatacacatacacatatagccttaaaaatcagggcaaaaagaaaataaaaattagaccagagagaaaattatgtgaaaaggccagtatttcgggtttattgaacatttgctagtgccaggcactgttgtaaggatcttactgtatcagcccctttaattctccacagtcctacaagggaggtgctgttgttaccccactttacaggtgagccagtggaggtgccacagagttcggaaacacggtcgttcccgttcctggagctgggattggaacactgccatttggcaccagagctccactgtgtcctgtaggctcatctctaaagctttctcttttccattcactaaattcagagagaactgagaactcttctaattggattcattgggtttctcttcactaatcctcacccaacagtgctcattaagaagcttaaagccatcaacttttttccccctagcctcatgtagcgtgatacctgattctgaaatggtctttaaagaccctcacaccagctaatggcatcaccctcgaggggctcagttttcccacgctgaccagtgggggttttccagcttagagcatcatgtttacctgctcgcggggacatggaatgagatggaatgtcctctcctcccaaggccgtttggattcctgactgtggtgctgtagtagcaggagacagggctttagccagctgtgtcctggttaagttacattccccatctggtaatcctttcgtattttatttggagttactcctagccagtttttgtcaggcgtgggagagacaggcagggtgtgaagagggtatttggggtgaggcttacccggtacatctaaatcagtgagcctcaaccctggctgtatattaaagtctctcatgtgattctaatgcacagccaagacggaggagaagtgctctgaattgggagaagcaatagcaagcagggctgagagcagcaggggagccaggtcgggtggcggtggagagccttgcctcgggaggctggggcgtggagttcccgtcccacccatcactcctgcatgaccttcggcaactctgttaccccaccagtgaagtggacagtaaggggccgtaactttctactaataaccttgctcttcaaagtgcagtcccagatgccagcttcagcagcaccttggagcttgttggaagtggagaatctcagtgcccacctggaatctgaatttgtattttaacaagatccccaggtgattcatgtattcattaaaatgtataaagccctggtctgtatgattgatttgactcagtgtcctccagtctgtgtccctccatgccgcactggctgcctcactgaggactctgaagagtccggcactgagcgaaccagagttatttggttcagcccagcatttgccacatgtatagtctcagatgccctgttgtttatggagcagctagtaccatttctcaaaacacagtttgggaaacacagccctaattgatcctttaaggaagtggcaattagcctaattgtctgttgtcagctttaacttttaggtctattaacttaattacattgattgtatatgtgggaaaagtacaggacaggaaaaaaacctccaacgctggctgtctttgtttaaaaaaaatcttgacccacgggagaggcagggtgaactcagggttctccatacagccaagagccaggggacatgtggggtcctttacagatacctcttctccctctgagtgggcatgatccttcctgttttatgtccagggaaaccgaccctcagaaatgctgggaaacagctggtgcctctgacagcgtaatcctcatgcccttgacaattagccttcctcctggcacctgccaggcagcacagctacacaggaaggcagatccgcttgaaatggacaaaccattctgtttctccaaaaggtggaaaccctattcgagatgagaggcctggctgtaattacagttagtaaagtcagaggacccggatgtccctgatgtactggggactggcgttgtgatagcccctccatacattagctttcctttctcagattctggtctgggtcttgaatatctttggaggaggagaagtaatgctcatcttattagcaatacctcacggcccttcagcttgtaatgtcttgagcactgggctaggcatgtcattggacttataaaatcacactggccttacagacagatacaatgattcatgatttattttctttgttttatttttaaagttagcatatgataaaattaatgtgtgtttgtgcactcttctatgaaagttaaggcttgtttatcatgtaatcaccaccatccagatacaggacagctccatctctatcacccctcacatctcatgctgtcactttatagtcatactattaatttggttattttttgtgtggtaagaatacctaacatcagagcaccctcttttttgagacggagattccttcttgttgctcaggctggagtgcaatggcgcaatctcggctcactgcaacctccacttcccaggttcaagcaattctgcctcagcctcccaagtagctgggattacaggcatgcaccatcaagcccagctaattttgtatttttagtggagatggggtttcaccatatttgcctattttagatacttcatgtaagtggaatcatgcagtcttcattctgtgtctgccttatttcacataacgtaatgtccaccagtttcatcaatggtgtcacaaatgacagaatttccttttttaaggctgagtaatatttcaaggtgtatatataccaatatttacccattaatagacatttaggttgtttccacatcttggcagttatgaataatgctgcagtgagcatgggagtgcagatgtctctgagatcctgatttcaattcttttggataaataccccaaagtgggaccgctggatcctatggtagctctatttttaatttgttgagaaatcttcttcctgttttccatagtggctgcactatctttcctccccaccaacggtgtacaagcattccctctccccacatcttgccaacatgtcttttgtttttccggtaatagccatcctaacaggtatgaggtgccatttcattgtgatttttatttgcatttccctgatgaatagagattttgagcatcttttcaagatcttggccatttgtatgtcttgtttggagaaatatccattcacattttttgtgctttttaaaattggagggtttttggccaggcatggtgactcacacctgtaatcccagcactttgggaggccaaggtgggtggatcacctgaggtcaggagttcgagaccaacctggccaacatggagaaaccccatctctactaaaaatacaaaaattagctgggcatggtggtatgcgcctgtagtcccagctagttgggaggctgaggcaggagaattgcttgaacctccgggaggcggaggttgcagtgagccgagattgtgccactgcactccagcctgggtgacagagtgaaactccgtctcaaaaattaaataaaataaaatagaagtttatttttgccactgagtttaaggagttgcttatatattctggatattagccccttatcaggtgtatggtttgcaaatgctttcttccattctgtagttgcgttttcactccgttaatgttttctttattcagttttaaaatggtaagccaaggcacagagctggaatgggagtggcccaggacacagctggtgaggtgcagagctggggtcccagagcctggcacctcacatggtgctatcctgctttgctgatttttcttgctgatttttattattcttcactagatcttctctcccctcccactttcacaccaacatatagaattacctaaagtatcctttaagaactttgggaaaccctggtgatatttggcgtgttttgatgtcttgctgggtccaagagtatgttcatggtgtgcagaaagagtctccaagtcttcaggggaaagtggtatgtagcggtccaaccctggccaccctttctgaatggtcttcgcccttgcaaacccctctggggactgaccacaggtcccctgcggaacgctgtgaagtgcccttggaactgaccctcacattgcactcattcggcagaactctctggattgaaatcccttcctcagtgtttaccagctgtggggcccaggacaagacactttgcctctgcaagcctcagttttcctcatctgcaaattggggtgctcatactttctttgcggggattttgtgagggtgagatgagctcatgtggaatgtgagacaagtatacttggaggcgggaggacatttccctctcctctgcctttcctggcggcatagtcctgtgcacctcaccgagccgtgatagatggcagtagtgggtcttctggtaggtggacgtggtaaaaccagggcctccggggtttgcagggcacagatacaatcacatgggaacacctgagatggtcagacccagagttagacccctctccctttgtggtacccacacagccatagacgtcaaacaccagtctgtggtaagggagaaagtggccagagggtcacacactcaggcgcccctacctatcagcaagtacctcagtcggtgattgggcaagatgtgggccatggccacctggagcgcgaggccctgtggggaagggacagctgacatgcagctctgttgcttactgcctacagatgccctgatttttcaagagacaatgaaaatctgataaattgcgtgaaaatggttggccactgatctcaattttatttctgttaaacaccaaacaaatccttctgagggctgacgatagcctatgacaggcagggtgccgcctctgtgtcgcacatggcagtgtgaccaggacaagctcggggtgggcaggaccttgggctcgtgggaggtggcctggtgggcatggacttgaggctggaggcagaggagtgagggacccacaagtcaatttctttgggcacaggcagcctcggggccccatcccatgctaagccccctcccacccggggcctggcctggccctaggaccttgattccttcaggtttcagctggggctcccctcctctgatggtgtgggaatggcaccactggcccctgccattggacctgctgtcctctttggtgatcctagggctggcccaggtccctttggagtgacacaccctttctgcagatccttcaataccttcgtccccggggtgtctttcaggtgacttcccagggctatgctgtgacaacagtagtgcccacaatagtcactgcttatcaagtgctagactaaaggcttttcttggattccctcagtccatcctcaagtcaggtaggagccatttcccattcccatcttcttgaggaggacgcaggggtatagaggggggacaggacttggccgaggtcacacaaacagcaggtgatgccgctaagtcccaagtgcctgtctctgtgccaaagctggctttcttagccagtatcacgccccaggaggggagtgttgttaccctgattttcttgcaacccctccgtggataccccccatctactcagctgtgtttacagtctgttgccttgggggcaacagactgtagaagtggaagccttggggggccctggttgctggagaggaggccgggcctggtgaccatttcctaccagcctgtgcatctgtgggcgagagattatgctgagcccctgccgggggagccaggaaggcgtgcagcacttcctgtgggcagcgggcagggctggtcctcttgccggaggatgctctggccagtccccagggcccctgtccacagaccaggagcagctgggccatagagtcatctgttggttgaacacattgattgagggcctgtgtgccaggtatcattctagaagctggggacatagtgctgagccaaacagacaacccctgccctgcaactcatgatttaaaattcatgttttaattctggtattttgcttctctctctcttttaactaaatacactttttattttggaatagctgagatttacagaaaagctgcaaagctagtacagacaccctacatccattccgcgagggtccccaccttccattaccacattctcaccactaggaaactgacctttgctcatgactattctctaaactctgggctctatttggattttgcccattttccactgatgtcctcatggcaccccaggatcccatcgaaggtcccacatttgcattcagaacctgtgtgtccccaggctcctctgggtgggggcagtttctcggtcggtccctgttttctatgacctcagcagccttgaggaagacaggccaggcatcctgtagaatgtccccagcctgggtttgtctgatgtttcttcctaagtggacagggttatggttttggagaagcatccccagaggtgaagcgcccttctcagcacatcccatgggggtccatggcatccatttgacctctctggcgatgtcggccttcagtacctggttaagtcctcatttgggttggtggtctttctccccctcccccaatcccctgcacccatcattcctgtaaagtgaccctcctggagggaagtggactgactcccagcatctagaatcccttgtgtgatgctacgtgacttaacagcgcctctttctgcgctgtctgtgcaggacgcccagcactgggcactttgagtcacttctgagcccagcagcgtaagatggggcaggagaaggagcttgtaagaacccattgtcctccctggcctgccccttgtgccaggctgatgtcaggtggtttatagtcatgatctcatttcaccatcattacacacctgcatggtaggaggaactgtcttggctctgagttgggagacagcagagctaggattgcagctgatctgggtccccactccacagtctttggattatgccctgtgccctttgtaagaagagccaataagaagggctataggaaccatgtcataagagtaaccttcaaaggaataggaaggtttctcctggcgcaggaaagtgttttaagaggtgagcatgagacttgacccagagtcttttaagtcccttacagtagacagtggtgggcctgtctggagctcattgctgtggattcaggatgtgactcttgactgccgtgaggactaaataagtttgcctctgtaaagcccttagaactgtgcctggcatctgttaggtgcttgatatctattcgttacagaaaaaagcaccaggatatccaggctgtcagagaagatttatggatgggcaggaaattggactagagatgcctcctttgtgttagcctaagtcagctaattcctataaacaacctgcagatctcagtgctgtaatgcaacacacgtttattttttgctcagtgtaacttatgctgggacttgatgactgctcatgaagtcccagcagaagatggggtgctccgctccccctgggtactcagaggccttgactccttgcgtcttctggctctgtcctcctctggggtgtgctggatcctctccttggcctggcagtggtggggagagaaaggaggatggggacaattgggtggcaggtcaagatgtggggccatcacttctgctcacactcctttgtccagaactcagagacctggtcacacctaactgcaggagaggtcagcaaatacagtctagcagtgtgcccagaggaagaggaaagaaagtgctttcatgagcatgttaataagcatgtctctaccatggcaactgaaatcagtggtttttacccttccactattctgctactatcatcataatttttggcagattcctaaacagcatgtgatatatatatatattttttgttgttgttgttgttgagagggagtcttgctctgtcgccaggctggagtgcagtggcatgatctcggctcactgcaacctctgcctcccgggttcaagtgattcttctgcctcagcctcccaagttagctgggactacaggtgcgcgccaccacacccagctaatttttgtatttttagtagagacggggtttcgccgtgttgaccaggatggtctcgatccgttgacctcgtggtccacccgccttggcctcccaaagtgctgggattacaggcatgtgccaccacgcccggccacatgtgttatttacttaatattttttctttgaattaatcaggttttgaacttaacacttttactgatgaaaggtgaccttataacatctttggaaatggaaaagcaatagctcctgctgtaaattgatacaaataattgcaatgtgtttggttctcacgagcatctggtgcctggtgaagttgctgggtttgttaaaaaagagatattagcaagtgctagagagaggagatgttgaagacatagtagtgccaccctgaggctttctcgttgatattctgagcatactcaaaagagagctgaacagggaataacttttttcatggtggggtctgatgtcatttaaccaccagggaagtagggttcattccttttttccctccatcaaaaatttattggagggattctgggggaaaacaagacagacactgtttccaccttcatgatggttccaggctattggggaagatgggcagaacagcagggaacaaatcattgcacaagtggttattttccattgtgatgagtgctgagaaggaaggcaaagtagatggggcgatagagagtttatagagaaggagctcactggattagcttggctaactagtactcttcctcaaaaaagatcttcccagactgcctcttcaacctaacttgggtcatctgccaccccttttctggccgcacctttttatgacacctagacaggtccttcagatcccttggcacaattagcacagttgcagtgatttgtttgtgcagtttgtcatcttgtgtctgtcttccttatggagtctgagtcctcgagagcaggggccatatctatgtgttcatcactggatcctggtgctgagccagcgtctgcacactgtgggtggtcagtaaatattgactgaatgaaggaagtagagagacagggaggaagggtccagctgagaccctcctgcaatgtggcagaggggttcacctccgcaagaatggaggacttcattgctatatccctttgtgtttggaaaatgtttctagttttctcctaagtgcatctgaaagaatttattttgaccgagtcctgaggaattgggaagtcagacattactgaggccctgcctgaaggaggggtgggtggcccactacctatcctgatgggaggccaccacgtgccagctccccttgcttgaagccatgttagtccccagaacaggagtaaggcagccgggagaagacacctgacattccaccttcactcctgcctgggcattaggattcattgtaattattcccattttgaggaaatggagaccgagagaagttgaagacctggctcagggtcatacctctggcaaagtaacaaacccaagccctagctctactttccgacccccagaaagtaatgctttcagttagatcacctaaccctggaaatcttagttgcttgtttttgagttgagcaactgtgctctctctagcaaactggccagtttccctaatcacctggggccctgtgcggatccgggagagtcagattcaggtggcctgggaatctgcattttcaccagtgtcttcagtgattcttagggtcaggcaagctggggagaccctgaataagggttcccccattatgttcccagcgtaactctggaactgggtaccacaaatctttgttaacctagtaatgaccatcacaaaagcgagtgatgggactaagacttcagaaagcccttgaagatgtgtgtgctctagggatcattgttttctctgcagatgaggaagctgaggctttggggggttgagagttgggggtcacacctgcaggaatgcagctcttctgaatttgaatcccttacgttttccagttgatggcaggagtcatatgtgtcttggtgaatgttaggtcctcacatacccccaatgacagcagctgtgggtctcctctctgtcctggtgcatagcacaagacctcacccacgctgtctgcactcaacttgtttctggaaggcagggaggaaggaagctgtcagtgctagacatttgcaggggaacaggggtgggtaggtggtgatagtagaagtaaaaacattcactcagcatctctggggtatcaggagcagtgctacaaactataaatatcatcttcttctgttcttacccatcaagttggggcttttatttgcctcattttacaggtgagagaaccgaggtggcgtgatctgatctagtgttgggtgtgtcaacgtcgtgtgctgattagaattagtaaacacggaagctggaagggtcccaggatgggttcagtgtcgccctgatgtacccaacaagccaggtggcaggagctggttccacctttcgggcctgcctgactttccccaatttggcttccgttggccaagctgcaaaactgggtcacacttgaagccaggtgattggtcagagctgagttaaccctgagtcaaaggagggcatgagaaggttcgcctacccgccccctccctgccccaccccaccccaccctgggccaggcccctcacagtggagccacacaggcacgtcatcctgcttgggcctccgcctgccccacactcaccagagcatgacaagtcagccacccgggatttggctgttctagaggcactgttccatgctgccaggcagacctgggacagctgggctgagggctcgggggagtagagggaggtgggcaccgtgtagtgcggagaggcctagggctttggagtctggtggacctgggtgctgatcctagtgctcccacccactcgctgtgtgtccttgggcagctcacttcacctctctgagtctgttttctgctacaaatggggatacaaccctgaccccaagcagctgctgtgtagagttaacaagagcctcatatagccctaggtcttatttcagtgtcgaacccctcttttcttcctgcatttatgaaatttcctgacacatttggtcttctaaagcggaggttgcaaactggtggcatcagaggttgagttttgcccacaaatgtgattatttggccctcacatttttaaaaaattgaattttatgtcagcatttttgaatgaaaatatttcacataaaaatttggatttccagccgggcacggtggctcacacttgtaatcccagcactttgggaggctgaggtgagcggatcacttgaggccaggagttcgagaccagcctggccaacatggtgaaactccatctctactaaaaatacaaaaaattagccgggcgtgatggcatgtgcatgtaatcccagctactcaggaggcttaggcaggagaatcccttgaacccgggaggtggagcttgcagtgagccgagattgcacaactgcactccagcctgggcaacagagcaagactctgtctcaaaaaaaaaaaaaaaaaaaattaaaaattcaggcacagtggctcacatctgtaaagccagcactttgggaggccgaggcagccggatcacctgaggtcaggagttcaagaccagcctgaccaatatggtgagctcccgtttctactaaaaatacaaaaattagccgggcatggtggcatgcaccagtagtcccagctactcaggaggctgagacaggagattcgcttcaaccccggaggcagaggttgcagtgagctgagattgcgccactgcactccagcctgggtgacagagcaagactccgtttcaataaaaaataaaaaaattggatttccaatgcatctggaaaaatggacctcagtggccacatggcagcccagggctgttgctgggcagacctctgggaccttaaagcgggagatgtgagagccaggatcaggttgcaggcctagacagggaggtgggggggtatggtcacctcaggggcttcaggtgcccgaggacccctctgagacatgaggacagtcttccagtgtgactgacttaattccatctagtgaggaggtggcttttagagtctggatgcccctgggtaaaagggctccacttaccagctccttgggccagtcactgacttgtctgtgccactttctcatttgcaaaacaagagtaatgcgttgttagtaagcaccatggtaagcactccactcatgtcagcagctcatatgagtccatcccaagtaggagatttgcccgagatcgtctttgagagatgtctttctaaaggttcctggagagacaggcctgtgtctggaaatcccaggcagggactctgacggtgatcaggcctctacctgtcaatgggtgaaccagccaaaaggagaccgccaaagcatcaggtgcattgccaggggcattgccatgatttgattgggagggagtgtcagtgttgcattttttgtacccccactttgagccctgtgcttaaagacaccatcaaggccatcccctgatggtcttgggaatggatagagctgaaaagagtgaggcccagaggcagcttttcgttttccaaaacgcaggcagggtctgcccaggtgccctctgtgggcttgttagcctgcaggagctggtttctgctggctgatgttaagtcaaagaggtctcctggctctaactcagacacttcctcatacagtcttcttagtgggcttcctgctgacagtggatgccagggacccaggcagggaggtctcccttttgaaaggggccactggcctttgggaaatagtagagaccagtgattaagagcttgatctccagagcccctcataggccgtcagtgacatgagagcagagaccggctcagccttgttctctaccaggtccccagggccaaggacactgaaagccctttttaaaaaaagtgttgaatagtaaatgagcagggtcttcctcttgggtctgaacctcagctctcctacttgaagcctctcttgacttgccaacaacttaccgtgtcatcagcggggatggtaatggtaccttcctcctgggggacagtagagtttcagtgagataacgtgtacatcactcagcatggcacgcagccatgcgacgtgctcagcacatgtggctgtgatgactgtttggtttgcacaggcatttctatgtgtggaccttgacgcaggttcccacaaaggactctggccccatgggtgacggtgtcacagctgtccttttggaatcttcacctcacctaaactccctggcagtaatagcccaggggagagagggcatgtgggtttggccaagggaggggatctctggggaaagtcaccctgtttgtccaagaagcgcctgtgtgtatgtgtagatatgagtgtgcaaatgtgtgaaactgtgtgttcatgcctttgctgcaggcccacaaggtggtttaccacgtgctgttgttgcctggaaaggtattgcgcaggatgccatgtggtatgatgtccctggccccagcagccccagtgactggtgagcggctcctaggtctgctcctgcctccagtagaagcagccacaggagtcctggccacagcccccattgcggcccccatcgtgctgggtgctggcttttggaaatccctgcatacccgcaacggctcccgtggtgggggtggaggtggaggagctggtcaggccacccagaggcatcttcctcagtggagccttctgccaggtacctctcagctgttttccaaatgactacttagcatttccctgcctcgatccccacagcagccctgtagggaaggagtggcccatttcacagatgagaaactcgaggcttacagagtcagtctgcgcaactggggctgggggcaatgtgctggttaaaatgcagattcccatctccccccgccccggaggatgggatgtgggaatcagggtccaggccttggtgttctaagcagcctctccaaggagctgcgttgtcaggagagtgggaagcagaagcaggagccttgggccttacagttctgggagtgtgctctggccctgctgtttgctcagttggggcaattgcatcagcttcctgggcttccttcagctttctcagctgtgagctggagagagtggtgcccacctccaaggggcctggtgaaaattccatgatcagttcgtttatctcacttgggatagtggaattcctggagagttcaataaaatggtttgttgctattgttccacatgggatttactacaaaagcaatttcagaaacatccaaaaagatatccatgtgcataattgacagtagtgtatctgctcatctccttcgaagtgggagtttcacaggatggtgaatcagggttgctctacccccattttagagattaaactacagcaggcagggcaaggtggctcacgcctataatcccagcactttgggagaccaagacaggaggatcacctgagtccaggagttcgagaccagcctgggcaacatagtgagactccatctctacaaaaaaaaaaaaaaattagctgggcatggtggcctgcacctgtggtctcagctactcaggaggctgaggcgggaggatcacttgagcccgggaggttgaggctgcagtgagctgtgttcacgccacttccacttcagcctggacaacagagtgagactgtctcaaacaacaaaaaaagaaactacagcagacccttgaataatgttttgttataaaacattgatgagaaaaaaaagtatttcctggctggggccactgtctgttgggtttgcacgttctacccacgtctgcgtggctcttctgcaggcacccccacccacctacccacatcccaaacctgtgcctgtcaggttcatcagcacgtccgcatggtcccggtgtgggtgagtgtgggtgtgtgggcgtgtgtgccctgcgatgggagggcgtgctggccagggccggttcccgccttgttccctgagcagctgggatgggctctggccacccgtgacttggaactggaataagtgagtaaacagtgatcttacttgttttgacaaatctttcttaagtgtatgtacagctcacatgtattttaatgtctaatagtagaagtgttttgatctttatttggaagtttggtgttgtttttgtgaccagaaatatgccttaggaacttaagtcttgtttatatccattagcctgtggggaaattgtttttcatcttctgctgtttccctcaaagtcatggtttccaagaacctaccaacaaccttaagtgaggccttgctgtactgaggggccacctgggactcacacaggtttttagctaccagggttctggggctcctgaaatggactcagctctccttcagacacctacctgggctgtgttcccccaacggacagtggtggatgtgggttgggatgtcacaggtcactgcaccacctaccacctccctggagtggcatttcccagaacaccaggacacactgccgggtgggaacaatgacgctggtttccaggagagcagtgggggtgggagaggaagcatgcctacctgtcttccatacctgatctggacccagcaaacatggccctgaggtgctccacgccccatacctctctgctgggggctccacccacagcccttctgctgagatggtctcgggcctaaccaggacctcgctggcccatttgctcactcagtcatgtaagagatgtctgttgcatgtttactatgtgctgcgccctgtgctgaggctggagtacctggctgaccccacagacatggtccccactgtcatggggcttacacttaaacagggaagatggacagttggaggatcaagagttttcccagcgagaatatccagggaactctggggatgttctgatccagccttgcgtggggtgcgaggaggtcctccccacgatgttcaactcaaggccttagtgaggagcagagctggtttggtgctggggcagggagccaggcccgtccagcacgtggtacactgatgagggaatgcaccaggcaggcagagccttcgggcacggtgaggagtgtgccctgtcctcagcatagagaggccacgccttgtgttggggagccaggttccatgtgggctgtgagcggcccactcagcctgtgcttcagaggctggcctgggtgcagcccggcgggggccaggccagcgactgtcagctcctgtggcgtccagtctttttgccaagaggcctctttaattcacattttccacatcgacttgatgttttgaaaatgtcgacctttagttcatcaaatgtcacttattaaatcataagtcacatcccattcaattaaaaaaagacaatggactggtgactcagtgtatggtctcttggcaggagagaccctgaagcacttgaggccagaggaagacatgcgccttgtcagtgatccctgcatccctaggggtgggcagcacgtcattcctgtgagaggctggactggagagagagactgggttggcagccaggctggagaagctgtgaccagcctggaacgccaggcccaggcaggtggacttgaaacttactcacaagaagcaaagagccctgttggaaaggtgaggtttggtcagtcaggccagagaggagtcaaggccatgcatggaacagtgcttgactggaagagaagcaaatggcaaaatgtgtacaggcagggagtgaatcagggtgcttcctggaggagggacacttgagagatgagttggagtgaagtcagtagaggtgaagggattctagccaagggctctgcggcctgatgagaggctaggaggtgggaaagagcgggggatacaatgggcaggtgagatggggctgcatgtgctgcctcaggcactggggagccctagcaggttcttgagcatgcgtgttgctcaggaagaaaaataagatcaagtgaatgtaaaagctccctacagcttagaggagggagcaccgaaagtcttttggtatgggttagaatggttcccaaaggctgtgaggggagggttctccctgctgagatgactgcgccttatcagaccttcatggagacggaagacagactgtggagaccaacctgagaatggattgtagccttgccctcctacccttgcacctcagtatccctatttatgaggtgggagaagcagtaatctgcctcacggttgtgtgaaacgtaattaagccgtgcatacaaaatgcctgaagcatactgcaggcctgtagacagcactggggtagccaagggttggggcccctggaaaccccacaacaagaaattcacagctggggaattcaagagctttttgaaaaacagtgttggggccccaaggccaccagtagaccttaggaacatgatgtacgctgaagttcattcaaataacacggtaaagagactggccaccatgttttatgtatcttaaattaggaataaggagaacttcttgaagcctcagtttcctcatttgtaaaatggggctagtgactgcttcacagggctgttgtgaggatgaaatgaatggggctgagacgcttggcattggacgtagctgaggtagggtctcaggtgatatccctggaatggttcgattcattgccatgcaccatccttcctcagtagaggagtacacatttctgctccagtagtttcaaggagatgcttataaatatgcgttccttccttgcagacatgcctgcgggaggagacttctcttgagcctgggactcactgccttgtgtgcagcaatgaacagtcacagctctggccccaccctttgctggctttgggaccttgggcaggtccttcaccgccctgggactcagtttcctcacctgtaacaatgggctaataatggtgcccccccacccacccttaagcattgtgtgaggccaaaatgagaatagtgcacctgccaataagggctcagccatggccacgtggtcatggaacccctcctcctggggtctcacgtggccccaggaccccaggcacccctcttccatggaacttggcttcttccccgggttcttgtcttacagcttacgttatggttcctggagtgagaggagtaaaatcggtctccccatctgctctctgctttgccttccttttcacttttcatctccccaggctgttcattcgctcattcattcatacattcactcactgacacatttacaaatatttatactggtcactgtgccaggcactgcgagactcggtggtgaacggcagggatatagcccctgccctcatggagtcttgggcttcagcaattaaacatccaattaaatgtataattctcagttgacatgtgactataaaggagaaaagcagggggctgtgaggcctgcgtcttctaggggatcgggggaacctgactgcagtggtatttgacggctgtctgaaaggtgcttagggttcactgggccactgagaggcagggaggcccaggtggagggagagcatgggcaaaggccctgaggtgggaggtcacaggtcggccggctgaagcggctgctggacagagagctggggagtgccagggctggaggactcagctggccagaccatgaaagctgcataaaacaccgtaaggagtttatcctaagaagcttcagcccttacagggtggtgagcagatcctcacgaactcttgatgcgaagggaagagcggacccattccgggtctcgggcagtgtctgagcaaggggccggtggtctgcgcatctgcacactaggcccttcctcttcagtcacacgctagaggaacaactcacaatttgcacttagtcctgaatccgggcggtgacacagaagaaagtcatagacactcggggtggggcagaggggccctcactgagtcctctgccggcatccagccctgatgattgattctaatccaggccgcttctgaggacacgaggaaaaggctattagcataggccctactgcgtacctggcagacccaagttcatcatctcggctgaccttaccagccccccgctggcatgggtgggggtccgctgttgtccacagaaagaaaacagggctgggagcttgtgagggccctgcccaagattccaaggcccctgccagccagatgtttggggccaaagtccatgcttccctgccctgtgggtaacacgggggagattactgtttgaagtactttggacagtcacaccaggtcaaaaggtctgtgtggtcaaaagctacaaggcctgtggctgggggagctgtgctgaggacgtgattttgaggctttcttagcccagacttaccttcatagcttcctgggatctcccaggtctgggtcgtcatcggcgcccttaccggggagggctctgctcccctaaatgcccctgtgcacctgccccagccccttccctcctcctggtgcttgggtcatgtcgttccctgtgcatgccagtccccttacgtgcacatttttcctctatgatttttcctgttttgatgagacactgctcttggcggtgctggttcccaagaggggaccaggccccggcctggccagctggtcattcaggaactttgcttctaggcccagccccacacccagccacattccactagggccagaacctttgagctccgtgtgaatggggcatgtcccacccacgcccaactcccatggccgcctccttatcacccttcccagctgacggaaaaggccatattccatcctggaattagctttcccccatttctgtttgcttccagactgaagggtgggaaaaaaaaatgtcctaaaggtcacagtgccgtcccaagcctttgaagtgtggctgctctcattggctccacttagcaggatgaaactggggctcagagagctgccgcaggtgcctggtgctgctggtcacttctttgccacctctgagggaatcaccttaaaggggcccctggagccctccgtagccctcacacctcatgtgctgggcctgggctggattgcagcccttgctgctatcctccgcaggtgcccttggacaggggacagcctgcccagctgtacacagtggccttggcaagaccacagcatggcccataggtggtggcttcaggatttggaagcccggtttctctaactccaaactccacagtcagtactttggggttctggattgtttgtcggctgggttagctctgttctatttttccaactgtttcttgcctttaagctgtgctttgcctacaggccttttcttaattattcagctctgccagaggtgcttctgtagaaagtacttgtcctgagtaatttcaagcttttaatcttacctttgaagaaatatttaaccatcccatgctcctatatgtttgttcatttcttattcattctttcaccgaacagcattgattcagtgccagggaggggcagggacagaggtgaacaagacatgtctccagcctcaggtagctcaggtgtgtgaggcagtgcgctcaagtgggctcatcagttccctgacggggaactagcagaggagggcaggagggcgtggagaggtatggcaaccttgaaggactttggtgatggtgatgatcatagccagccctgaatagggttctctttatgcctgcaccattctgccccctcacatctgttaacatgcttcatccccacaaccagtcattaggaacaacttacacattgggaagccaaggcacagagaagttatttaacctgcccagcgttgcctgagccagggcagagctggggtttgaacccaggcctcctggctcctgcatctgcccccctcaccactgcacctcactgcatgcacgggagctctttggatgcagggatgggagcggtgtgtgcaagcctcagagctgtgaccgtgaaagaaacagactgctctgaggctttgctgcagaatctgggccagcaggtgtctgggaggaagccacccttgggctggggccaagcatgggtcctggggtcaggacaaggagagggactggtgcttgagtccttttggagctgcagatccatggtggggcttctgaatgatcttgtgtgaggaaggagtccagggtgttagccacgcctgtgtttctttgtgagcacaaaaacatattccatagccagagttccacagtgtttggagctctgcctgagaacctaggctgggactgtgtggggaggaagggccggcgagagcggatgtaggctgagccagcctcggctggagaccggccctggcactgactgcctggggtcactctgggtgaaactcatccaccctcctgggcactctgcgctctgcttcaaatccaccgccgaaaacaagctgagtcctgccccagcctgcagggcctgtgggatgtgtcctccatccgcctcgctgacctcgtcccatgccacctgcccctccctgcgtgccagccgcagtggccaccgctgctgctgacacaggccagccacacacccacctcagagtcttggccaagcactggccattccctctgctcagaatgctcttcccaggcacttggcgtagtggctccctcccttccctcgggtctctgccctgacctcacccagcctgcagtgccctctgtccggctctgtcagacccacgtgttctctttcatagctcctcccaccctctggaacagtcccatctccctttggcttgtttattatctgtcccctccatgggaacctcggttcctcagaggcgcaggctttgcctgtcttgttcatgcctgttgccccagtgccatcaatggagcctggcacttgtggatgctgactactcgttggctgaatgaatgaacctcagttgccttatttgtaaaatgggaagcatcacactgatctactaacgttgctgtaaagacgaaaggcatgttatttgggtcaagacacccagcactgtgcctgacacatagtaggtacttaggaagtggtaaataatgcgtgtgtcagccaaagtgtgaattactggccttgtttagacaaagtgtacacggcatagctctattttttgacattgccaggatagcctggtgctccccagctctaaaactcagggtgataggtggggcagaataaggtaagggcagaaaagaaaagaggaggaagtgaaaaggaagaagccctttgcagtgtggactacttttcagtagaaacgtagaaagacatagtttacctcaaggcctcgctttgtccactggaaagtttataaattcctgccaagaacttttatttatttatttattttttaattttattattattatttttagatgaagttttgctcttgtcacccaggctagagtgcaatggcatgatctcggctcgctgcaacctccgcctcccgggttcaagcgattctcctgcctcagcctcccgagtagctgggattacaggtgcatgccactgcacctgctcatttttatatttttagtagagacagggtttcaccatgttggccaggctggtgacctcctgacctcaaatgatctgcccaccgcagccttccaaagtgctggattacaggcgtgagccaccttgcctgggcaactgagtgagactacatctcaaaaaaaaaaaaaaaaaaaaaaaaaagatggcacaagataaggggggagataaggaagtgcagtagaggaaaatgtaggtggagacttccttacaccatcgagaccacacaaatgggcatgtgtttatagaaaggcccagtggtgaggatggcaatggtggtgagcactcccgagcacaaaggtggatgcccttcagctgtaagatcccttttccttgaagaattctccacagcaagctggctggccagccttgacttttctcttcctgaagggagcctggttctctactgactcagcagggaatgtgtcctttagtgctacttattgatgtcaggatatgaaaaacttccccaacctcaaatttgggacgtccttaccagtgtttctcaaatttcaatcactctagggctactgtcacagtttgtgccacacctacatctactcctactgttatatgctttgtattttatttaaatggactcactttttaaaaagcttgcatagatgagttttaaaaggcaaacaatttaccttctctctaaaatggaagaccaggatcacctgccatgagtccaaggtacctgtgaaagtcaaagcagtgagatgaaagttctagcatagagctattgctggtagacagttctgtgcctgaagctgagccttctatttatttatacgcacatatatacatacatacgaactctccctctgtcacccaggctggagtgcagtggtgcaatcccagctcactgcaacctcagcctccccattagcagggactacaggtagcacaccatcacacctggctaatttttgtatttttagtagaggcagggtttcgtcatattggccaggctgctgtcgaactcctgacctcaagtgatccgcccacctcggcctcccatagtgctgggattacaggcgtgagccatcgtgcctggcctagtcttctttttactaaaaagtgagattattaagtgtaaaaagacctactagtaccaaatgagatttttttctaaactcgattatgagaattgaaagaaaagtggaaaaataatcacttcttctgtgggtgatttgtgttatttgctgcccaatctgggttccacctaaaaccgtctcaggtacaccactgcgcagcctcccagaaccacccacctccttcctgacggccaggagacaaaggacccttgggcgcgatcagccgcaccttcaggctgagtggccaggagtcctcccgtggcccagcccacctctctctttcaggaattcaagtcagcgtttttgttggtccggatctgaagccacttcttccaggcagctgcccctgatctctcaacttcatagcattttggctctttaaaaaaaaagaaagaaaaaaaccaaacgtgtgactttcttagaggtgttagaattatcctcctggtatgttgttattctgacttaattccgagagcagggctttgtcacacggagctggtacctactgtgtcacagcactgcatgtggctcaacaggccagggcttttaatcgcttttgacatctactctctgaagaaatacatttatatcacaacccagtgtacaatacatgaaaactcaacatggccgggcgcggtggctcacgcctgtaatcccagcactttgggaggcagaggcgggcggatcacttgcggtcaggaggttgagactagcgtgaccaacatgctgaaacttctctctactagaaatacaaaaaaattagctgggcatggtggtgcatacttgtagtcctagctactcgagaggctgaggcaggagaatcgcttgaacccgggaggtggaggttgtagtgagctgagatcacgccactgcactctagcttgggccacagagggaaactccatctcaaaacacaaacaaacaaacacctcaacggttcttctcttactacacacaatgacaataaatattttgtagtcttttttttttttttttttttttggagtcttgctctgtcacccagcccagagtgcaatggcatgatctcagctcactgcaacctccacctgcctccagggttcaaacgattctcatgcctcagactcagtagctgggattacaggcacgtaccaccacacctggctgatttttgtattttcagtagagacggggtttcaccctgttggccaggctgggtctcaaactcttggcctaaagtgattacaggcaagagaaggataaataccacatttaggagagtatttctcctgggatgggatggagatgggtcaaaatggaaagtgcagacagaagaggaatataggggctgtctttttttttttaaatgctggttgcaatctactactttgattttttaactcactagtcatcgtcatctgcagttggtaaaaacattgttgtagagggttaaagcatgaaccatattaacatgtccccccccctttttttttgagcacctattatatgctgggcacagtgctgaacactgtctcattttgtcctaaccacgttttgcgtatcaggccactgagtctcagagagggacatcacttaagcccggctcacacagcaagtaagagcaaattaagattccagcctgggtcagcctgacttattttcatgtccttgaggccttggagcagttcccttgtgtatctgctgcaaagccttgctcaacgctcttcccagaggaagtgatcaaatgaaggaatcaaatatcaaattgctatagaaagaaattcttttttttttttttttttttttttgagacagtctcactctgtcacccaggctggagtgcaatggcacgatctcggctcacggcaccctctactttctgggttcaagcaattctcttgcctcagtttcccaagtagctgggattacaggcgcccgccactatgcctggctaatattttgtatttttagtagagactgggtttcaccatgttggccaggctggtctcgaactcttgacctcaggtgatccacccgccttggcctcccaaagtgctgggattataggcgtgagccaccgcacctggcctatagaaagaaattctaaaacagtctctttaatattaacataagccagtgcaaagggttcccaaatgtggctgatgacttggttttctttctttctaaatgtttaaggaatttttaaattgaggtattgcagattgtaaagtgttcttatcttaagtatacagctcaatggcttttttacctgatacccccatgtggccacccccagatcaaggtgcacaccactttcagtaccccagaaagctcctgcatatgcctcttcccagccagcacccccaccacggggtgacctatctcctgacttccctccccttgctttagtcttgcctgttcttcaggtcacacacgtggaatcatatgatctgatctgtgtgtgttggacttctttcatcccatgtcccatctgtgggattcattcatgtggtcggatcagtgcttcattcttttttattgttatagtacctgattggggtacttttgagcttattttttatttcatagactattttggacatatagaatcatatagaatcacacccacctcccatcctaagaagcaaaccttaagcccctatattcctcttctgtctgcactttccattttgacccatctccatcccatcccaggagaaatactctcctaaatgtggtatttatccttcccatgcaagttggtaaatttgtactacctatgtacaatttcttaacagatcctttgagtgagtataaactctctttttcttatttggtattgccgagtccaattaaattttaatttaaatgttccaagtgtttctgggattcagaacctcagctccatgctctagaggtcaagacagttggagcaaagtccagaaggaaaggccaactggggagaggcaggaggagagcagagtggggagagaagcggagggaggtgggtgtgggagggagatgctcacagccctcagcagccatgatctggtgggggcccctgccgctgccctggtttttctctcatcttggacctatggggaatgcaccgtgcccctctttctggcctaatttcctgtgtccactggtgccacctctttgcagaggcagccttcagagggatttgtgggggagaaggagcttctcctttgggaagaaaatgcttgtggtcctccatgtaccctacaccctgcagctgcgtcacaggggaagcactcccccatgggggccaggcgctgtgctaagccttttccctgtactaacatgtgaaccccctctgagcaagccagcgaagtgagcactatttgacagcctgagaaactgaagcacagggcagtgaagtgaattccccgaggccacagctagcaagtggcagagctgggacttgaacccagaaagggcagctccaggctcaccacccgtatactctccagtctattgtctagtggaggcacgggcggcccaggggccttccccgatgcttatctcattctgtaactctgcattctcagtggaggttttcttgactctagctccaggcaggcagagactgcctttgtttggctcccatttttatcattagcagagcaggtgctagtgatatttgcagaacaggtgctgaatgaatgcatgaacaaatgcatgaatgtggaaatgaaaggggatgcagatggagatgatgcagatggagatgatgatgcagatggagatgatgcagatggagatgatgcagatggagagcagtggccatgcagagtctttgcagaccttggcttggcttcaggctgtgggggctctgcaagccaagggtttgagttccacctccagtgcttgccagcaatgccaccttgggtgacctttatcttgctacctggaaagtggggatgctggcagcccctccctcctggcatcactgacactgcatggtcagggtgtgatccctttgggtacaggcgggggtggtggacctcccaggtgggcaggtccagtttggatgaaaggccaaggacgattcataggagagcacaggagtccttgcttagccccagcaattccacagaacctgctgtgaactgctggctgctgcccgtaacttttccctgtccctatttccactccttggaggccgcaagaacaactgctggctggccttggccactgcctcagtgttccagcctctgccgtcatttgacaccaagaagacagccaggcaggccttggctcactgcagaggtgttactccacccccgagtcctagccgccccctgtcctctgggtcctggctgggctgggcaggagggcactcacctctcccttctctctctgccctagcatgaaccagcagaggggctctcaatcctggtgctgggcagtgggtctagatttccctttccatctgcaaatatacccaccatttcccttccctgcattctgcgctcagcagggctattcacaggaagcacagaggacctctccttcacagtgagcagttgaccttttttgagcacctactgaatgccaagggttttttctacatttcaatttgtgatctcatttgtttctcaaaatctccctaggagggagacgtaatgcccctccccattttactgatgagtaaactgaggctccaagagattcagccagttgcttagcagagtcaggatttgagccgaaagctggcttgtctctactcccctccatgctgctctgcagaagagagaagccatagaaagctcaggaatgtagtgacagtcgcagcgctagcgatgatgataatcacagctcacatccaccatgtgcttgctacgtgctgggagctgccattcaagccttacatgcgtttctgcatttaatccttactcctgtgaggtaagcagtattttaaccccattttacagatgtaaaacactggcggttcagagaaaaatctgtccaaagtcatgcagctaatgcatgagacagcagagcccctggctctgaaaatccgtggagattgaaataccaagcacactggttcatccagacagtgggatattgttcaggattgaaaggtaatgagctagaaaaatgtgaaaagacatggaggaaccttacatgcctcttactaaatgaaagaagccaatctgaaaaggttctataccatatgattttcactctgtgacattctggaaaaggcaaaactatggagacggtaaaagatcagcggttgccaggggttgcgggagggagggatgaataggcggagcacggaggatttttagggcagtgaaactgtgtgtgatgctgcagtgattgatacgtgtcattagacatttgtctaaaccgaaggaatgtacaacaccaagagtgacccctgatgtcaagtatggactttgggagacaatgatgagtcagtgttcattcatcaatcataacaaatgaaccctgtggtacaggatgttgatagtgagggaggctgtgcatgtgtggggacaggcaggatatgggaaatcgctatcttctgctcaattttgctgtaaacctaaaactgctctaaaaatatagcctatgttttaaaagagggaaaaaagaaaaacaggttcacgatgcacttggtgcttgagccaccacaacccccagcagtgatgtgcagcagggcgtggctctgcactctgcgggggcttcccgggctggcttagctgtgggatcatcttctccagtggttcttccaggcctgctgtcaggtgcagtttgaaatccagttcaggagtgcaccttgcgtggggagctggagggaggcaatggttgctgttgggtgactagcagaggctgagggaatggcaggcatgccagggctctgccagtgtatagacagatcttcccccctggggaggaggaaggaggaggtgaggggggtgacaacaacattctttggtccccattccccaggacagcgtgtgctcaggggaggctggcctcacccctgccagggaattgcaaaattcagcttcagttgaatgagtgtcctttggaaaagtacattttgctcaggagccaagtaaaactgaggactctgcagccagcacactgaagtcgctagccatgactcacaccgagtgggatggggagggccaagctgggaggcaagccatggctctctggtgggtccaggctccctctggcgccagacccctcggctgggctcaggtccctcagctgggatatttcgtgtgccagaggtagcagcctcagatggctttgtcagggttcagactctccttgctatttagaaaagatgttgtctctaagaagtcatggagaaaatgaatcactgtaaaaatcaaattttcttatccacttgcattattggtttagagatggcttctctccaagataagtttttggtagactgcagatcaaaatgtttaggggcatctgggggtgtcatgagaagagccccagatgggacacccgttcttccttgtgacattagggaatttggtacagctttctggatcagtttttgcctttaagatgcatctggactcatcaaacccagaaagtgtagagcaaatattcctattcccatgtccttggcagacattgctaatctatctcagggctccaacagagttgggtctcagccttaccagcctggcagccactagacttgatccctgagatgaaacctcttgaccacacaggaactccatgatcttgaagctcccttctggctctataacttttatgtctctctctctcttcttgctgtatctttcattctactgactattctgatacaaaaatacttcacgttcaagatttaaggccaagttcacaaactgataacactcaggccaaatctgacccacagaagtgtttcctttgctttgcgtattattttatttttgaaacacttgccatcattttttaattggtgattttacctaattccccagatttctggtttcacttaacgggctgccctcggaccccttggttccagccatgtgccaagctgggaggctttctatggactccacagtttgccacaggccacacccagcccacttctctaatttccagttcctgcctattctcagtaggcatttttctactccagacaagtatacttctgtcccacatgtaaggcctggctgtctctcatttgctgatgtgagctgctagatgaccaacgctccggtctgttaactcacttgggatgctgacgtttcctggaatctctttcagagggaaaggtgtttcctctctatgaatcataactgcctgatgaattagttttacatttttattttctcatgtgggctttcctcaaagcaggggctcagttatgccatgaactgttgaagaaagcacaagttgaggcagatatgggaaatttagcagggggagcggggagcagagcccttccctccctctcgcagccactcccttcctccccgcctgcctgcctggatctcctctgcaaagcctcattgctggtgggtggtgaggaagccaagtggctccccgagggtacttgcctgcacagctcaggtgagctcttggctcaggaaagactcacagtcttccctggctcagcgggccttttgctgcttaaagatgatgctcgccacttcagatcacagtgccagcccctggggaaccccaagatgcgtaagacaacctcctgcccttgaggaattcacagctttgaggggaagacaccaatagtattaatgaggcagtgtgggccgtgctgttgtttgtgaatgcagtccacgcatgctcagtgacatcaatcatcgcatgtgcccggtagtaacagggagacctcaggggctgcagaggtccccgtgggggcacttcatccggcctgaggctgattggagatggcttctcagagaaagggatgcgtgagctgagttttcaattgcccgagacctctgacctcactggccactccagctgtatcagcctcgctgctgttccaggaacctgccagatacgctccctgcctcgaggcctttgcacttgctgtcccttctgcctggaatgctcttccctggctatccctgtggctgttgtctcacttaattccgatctccatttgcatgtcatgatctccttgtctgatgagccccatccgaagggccctggcattacactatttccttaacctgttttatttttcttcataacgcttatcagcactgacatatatgagttcattcactgttggtctctcccactaggagataatctaggtgaagactgggagatttgtgtctgacctccgatgtgctcccagcacctagatcagtgtgtggtccacagtaagcactagaggatgcaaagtactgtgagctgatgaaggagagagagggggtgatgcagacagatggcaccaagctggaatagcagtggtctttggggaacaaagaatgttggcgggcagtggggtgagaaggaggggcagataacacacagccaaagacagatctgctaagacaggccctgactgtgtctttcttttcatttataacctgcttattatagaaaaagtgacaacactgagatgtgccgaagtggaagtgatcaccaactagcctctcagccaggcccacaaggaaaacattctgacccctttcctaaggcccttttgcctgggattgtgtggagagtttcgccttttcatttgtgagccagatcttgctttctaaagtgcacagctagctgcctgccccttcaggtctcttcgctgtgctcccagcccagtgcagtaaccttgtgttcagatgggcgaggacatgtaccccagcttggccacgagatagagtaacctcgggcctcagggggccatgaagctttgcaggaacctccaccctttctcctccagcctcgtccccatgtgtctgcctgtactcaaggcctcagtctgagtcactgtctctacacagtctttcctgaacctcagttttatttttctgtaaaaatggggatgaagctagtgtttataccttgaatggttttgaggatcagatttgaggatcagatgagacaatatgagttactacttgggttcatgggaggtgctcagtaaatatcattctccttcccctcttaaaatcttaatcctgcactgtgcttttaccccaggcctcaccagaactcagccttgacttatttctcaaggtcactgagagtgttgtcaaaaggtggtctcaggccaggcttggtagctcacacccgtaatcccagcactttgggaggccgaggcaggtggatcacttgaggccaggagttcgagaccagcctggccaacatgatgaaaccctgcctctagtaaaaattccaaaattagcctggtgtggtggcacatgcctgtaatctcagctactcaggaggctgaggcaggagaattgcttgagcccgggatggggagcttgcagtgagccaggatcacaccactgcattccagcctaggcaacaagagcaaaactctatctcaaaaaaaagaaaaaaagaaaaaagaaaagaaaaaaaaggtggtctcatagcacaaagcaaagctgaatcaattgggcaggtggaggtcaagggacacttggggtccccaaaaggggcacctttcacaggcatcttggcatggctccttcccctaaatactcccctcctaaacttaaaaacactgacaccaacagtttattctttttaaatctctgtgaaaggccgtgcctggcggggagccacgggcatgagaatccagtccccggaatagctcctgccgctcagcgtttaaatgccgtctgtatttttatccgatgatgggccacttttgaaaaaccccgctcatgctctgcccctctaagaatacatttccatttatagcatctgcacacaggatgttgttctatcccggtgtggggccaggaggccgtgtcctgtttccagtgagttggaaacacttggggggcccttgctccccccagcccagcactccctgtggccttgacaagcgggaagcctgactcccggccaagccctggctgcctttcctcttcctgtgcaagcctgagctcatctgtctgtcgcaggttggggaggcaagtgggggtgaggggcccctctccagccttgcccagccagggcctccaggtgacacagcaccacagttccttagctccgtggaccctgcatccttcactcactcacccagtgccacggcctgctgtcagcatgggccctgcatggcacaggagagcagcgatgagtacagagagccaaggctcccagggcccagtggggagctttggggaggccagggaggatcagtgttcagtctccaggatgaggctggccagggttccagtcctgactctgcttcttgttagctgtgtgagcttaggcaagtggcttggcctctctgagcctcagtttctgcatttgttgaaggaacctcaggagtagtagggaagattctgtggacagagtaggccaagtgtctaagcagtgcttggcccatagggtgggagtccaggaaatgccagtcccctttcccgtccctctgttgacctgtggtaactcaggtgggtgcaggctaaaagtcttaggaaatctgcttgaagttagatataaacacatgccttacaccttaggaattctagcacgcatgggcatctcctgaactgtgcttttcagcaaagcagattcctgccctgcccacctcacccctcaccagtttagttcattctacagtggggccctggaatctgcaaattttttttttttgagatggagccttgctctgtcccccgggctggagtgcagtggcgtgatcttggctcactgcaacctctgcctcgtgggttcaagcgattctcctgcctcagcctcccaagtagctgggattacaggcacacgccaccacgcctggctactttttttgtatttttagtagagacggggttttaccgtgttggccaggctggtcttgaactcctgatgtcagatgatccacccgcctcggcctcccaaagtgctgggattacaggcatgagcaccatgcctggctggaatctaagtgtaacagcttccacagattctgaggcagtggtccttggacaatttttgagaaatgctgccttcttcatccattgcacaagtgcttctcctgaacctactctatgccggacacttttctaggccctggtgatgtagacagatggggttccagctctctggtgacatattctgatggagtcaggcagtgagcagatacacataactcaacatcagggagtgattttaagtgctgagaagaaagaagagggcagaggctgggcgtggtggctcacacctgtaatcccaacactgggaggctgaggcaggcagattgcttgagcccaggagtttgagacagccagggcaacatggcaaaaccccgtctctacaaaaaaatacaaaaattagccaggtgcagtggtgtgcgcttgtcctagctccttgaaaggccaaggtgggaggatcacctgagcctagggaggttggggcagcagtgagccatgatcgcgccactgcactccagcctgggcaagagtgagaccctgtctaaaaaaaaaaaaaaaaaaattaaaagaagagggcagagtaagcacaggctcccccgaggagatgacatttgaaaatagacttaagtaagggagcaagccatacagagatgcaaaggcagaaccttccaggtagaacggtaattcattcaagttctccagctgttgagtggcagaaagtcaagggctttccatacctcctctgctttttcttttacatgctatctataagggtgcttttttagctgaagtagcagaaaagtggactagaagaggtttaaataagagtttttttgttttcattttttttctcatgtaacaagaagactggaggtagcttgcttctggtgttggctcagcatctcaaggatgccagagtttttatctctgctctcaactgcacttttcccttatggtctcagaggagttcccccagctccagatgttatgtctgcacccaggacaggaagatggggttggggtagaaatgttagtgccggtgatgtgtgaccctttgattataaaaccaaaagccccctacccccccagcaggcttctgcttattatcatcagtcagagcaatggtatatggccaccccatgccacaaaggaggctgggaaagtgaaagtaagtggttagggttaaagggaatcagaatccaacaaggtctacctattgcctgtgggctttcttgagacaggatctcatcctgttgcccaggctggagtgcagtggtgcagtcacggctcactaaagctcaaactcctgtgctcaagtgatcctcccacctcagcctcctaagtaacagattacagtcatgagctaccacacctgactaattttttaatattttgtggagacgggatctcactatgttgcccagggaactcctgagctcaagagattttcctgccttgggataacaggcatgagccaccatgcctggccacgtcctttatttattgaagaaactaggtcatttattctgtagaatgcccgcattatggattgggcttattgaatcatgtaacctgttcctggtattttctgtaaactggtggttagatctggagccttgattaggctcagggtcagttctctgggcaagaagcattcctgggtactgctgtgtgctttgtattgtgtcacattgagaggtacagaacaactggctttcttcgctttgagatgctcagatggatcactgcgttcaggcaggcagatggatcactgctttcaggcaggcagatggatcactgcattcaggcaggggcagcctgttctatctgttaggaagtttcctgtcgttgctgattattgtctagagccaggatttcatcagtggatgcacaaagaggatttttctaattctcttagtctttctgcatacattctttgaagttattctataaaacagaacgttgccctcatcaactatttggctagctagaaatacattttataccaagaaaaaaagtcagagtaagtgcattctctttatttaccaattttcagaataatgagttggtggtgtaggatcttaaaggtgtccaacaaggcttgttacttgtttttaggaagtatccttatgaactcatggatcacttaatgtatgggatgtatttcaatcacggctgttattaaaatgttttattcagacagctttattgaggtataatcgacttacaataaatgtcacatgtctaaagtgtacaatgtgaaaaatttgacatatgtatacgtccatgaaaccatcatcacagccaagatcatggatatctacaccacaccccaaagcttgctcctccctgtcctttccgctctccctgggcagctgatgatctgctgtcactctagattagttggcatgttctagcattttatatagacagaaccataccatatggaccctagtttgcctgccattcagcataattatcttgagaatcatccatgttgttgcagtgagccgaaatcgcgccattgcactccagcctgggcgacaagagtgaaactccgtctcaaaaaaaaaaatttaatgaagcctaatttatcatttttcttttattacttgagctttttggtgtctcatctaaaaagataatctttgcctaacctaaacttacaaagatattcccttatgttttcctctagaaggtttatagtaagtctggacatcagatccaaatttgttctttttcacagttgctttggctgttctaagtcctttgtatttccatatgaatcttagaaccagcttgtcaatttctacaaaaatacttgctgggattttgattggaattgagttgaatctatggataaatttgggaagaaatgccatccttacaatgttgaatcttctgacccactaacatgtctatatttccacatttacttttgctttcatgtcttctttaatttccctcagcagtattttcagtatatgggtcttgtacttttttctcaaatttatctctaaatattatatatatgtgtgtgtgtgtgtgtgtgtgtgtgtgtgtatatatatatatatatattttttttttttttttttgagatggagttttgctcttgttgcccaggctggagtacaatggcacgatcttggctcactgcaacctccacctcctaggttcaagcaccacccccctgacacagggacacacacataaaatgtaacagaatgcagcgttctgccttggccttttcctcttactgtatcctggagattcccctgtgacagtgtcattttcccatctagctgtatcaccctctgcgttatgggtgatctgtagtgtcccctttggctggatgtttggatgacctcccgtcatttgctattacagctggtgctgtggtacatagccttgtgtagatgtcaatttatattttcacctggagttcactgagtgctattaatgggccaggccctgcgtgacccacaggagattcaaggacaaatctgacccagcccagcaagagtggaagaccctgcagccagcctggggctgggccgggtatagtccccagagcctgtggagactggggagctgccttgggatggggagtgtggtttgtctggccttccggaagtcaagcagtcagatttactcttcttcctctttgtccagacttggtctttgtgggaaggaggggaggggaaaggccaagattttgtggtcagaaagggttatcacggatgggagaggtcacatgtggagatgattggggtagaagtggaggctgctggagctgggaggccatgccatgggcaccaaggtctagggagagagctgcagggagaaaaccttatatgcgttggtgacatcagcattatgtgctatgtagaccaggagtcgtcacccagatttctcataaatccaggccttcactccttcacctgccagcctgtttccctcttccaggcaggcatgtggcccaggggtgagaagaattgttctactgccagactgtgccagttcaagtcctggccctgcatcttgggcaagtaaaacagaaagaatgctactgtctaccatacagggttatgaaagtgatccgagatactgaacgcaaagtgtaagccgaggcttcgtgcgcagtaagccctcgcaaggggggtagcagcagtcatagctgtgattgttactattatattattattattattcctccctcaaagttgctccatctgggctggagacagagatggaccttttttcctttggacagagggagagagtggtatgaactcatcttagtagtatgaatgtcaaggtcaggatttgaggggggcgatgagaatgattctagggctccctcccgcctgcctccacttggctctggtgtgttcatttgccttcgtgccccccaacacacatacacgcatgcacacacatacactagcacagcccccgggccagtggttctcagtaaggtggagggaatgagtaggtgaacaaacgagtgagtttttcgcctcactccctggcactcggcaccgagggctccgacaggctggtggccagggctgaccagccagagtttcatctaaaagcctcgatggctatttttgggacaaatgacccaccacttccaatgacttgctccgaaatggcatctaatttcattaagccttggaaacagtgacatcacaagtgcctgcccggtagccgcccacatatggcgaaccacagagtgatccgagattcgtctgcaagaacaggggagaactaaggtcccaagcagcaaaagttaaaatagcaaagctgaggcattctgctatgaaaagaaattacagatgaaatccattagtcagacatttccagcggcagtttccttgcttgggagcaggggaagacgtgtttattcggggttgggctctgcagccattcctcactctgtaggcaagatgtggcccggaaagtgggtttctgttaaggaaatcctatgttctcattgacttttagcaccgaccttcctgtacattctcatggaatttgctgtatcctaaggcgtgaggaagctagagacgtggatttggcacctttttgattaacatagtgacacttgtacttaccacgcccttacagtaagtcacaaagtaaattcagacggacttcatcttttccctatgggttcctttgctttgttttttttccaagtgagcgctgccttctcaggcacagagcaaaaagggagggaaacactgcctaactccagattcttggtctccatggaggccatcaaggcggtggctgtgacatcacccatcgggggcaggagcagctggaggcccctcagagagagcatgggatcaatgggaaaccttctatgtgggaggttttattccgcacacaacagagcttcccagcctcaaccctattgacacttggggctggtcattctttgtcgtggggggaccttcttgtgtgccatggaatgtttagcagtacccctggcctctacctatgagatgtcagtagcaccccacacccagcgacggcccaaaagacaaatgtccactgagaggcaaaacctctccttacatgagcactaacaaggattgattggaaagctttttagtggcttgtgtttatttatttactttattatttatttattttttggaggcaaagtcttgctctatctcccaggctggagtactgcagagccgtgatcttggctcactgcaacctccacctcccagattcaagcaattttcctgcctcagcctccccagtagctgggattacaggcacctgccaccatgcttggctaatttttgtatttttagtagagacagggttttgccatgttggctaggatggtctcgaactcctgatctcaggtgatctgcccgctctggggcttgtttttatttttaaaaattattattattattttatttacttattcttgagacagggtcttactctgtctcccaggctggagtgcagaggcatgatctcagctcactgcagcctggacctccctgggctcaagcaatcctcccacctcagcctcccaagtagctgggactacaggcgaccaccaccacacccaaccaatttttgtatttttttgtagagacagggtttcaccatgttgccaggctgatctcaaactcctgacctcaagtgacccacccacttcagcctcccagagtgctgggatgacaggcgtgggcaccacacctggctttgtttttgttttcaatactctgagtttaattgcaccttcaagtgagcaaggcacacctcttcttgaggctttggctttctcttctgtaaagcgaacgggttggacacagtgatctcagaatccctgagagagctgaccgtgaggagcgttgagggcagggggccctatggggtctctgtttgggttctgccccagcaggggataaaccgcgtgcccagctagccccagtccccactcccattcccttgacccctggcatccaggttagtttttcttaagtccagttggttcctctcttgctttaattttggcccattttcctttttaaaaagtgaaaatgtggctggacgcggtggctcacacctgtaatcccagcactttgggaggctgaggcaggcagatcacctgaggttgggagttcgagaccagcctgaccaacatggagaaacctcatctctataaaaatacaaaattagctgggcatggtggcacatgcctgtaatcccagctactcgggaggctgaggcgggagaatggcttgaacctcggaggcggaggttgcgatgagctgagatcacgccattgcactccagcctggaaaacaagagcgaaactccatctcaaaaaaagaaaaaaaaaaagtgaaactgtctaagtatccacaaaagtagagaaaacggtacagggaccacggtgtactcaccgcccagcttcaccactgcccatcttatcttagtctcatgtttaaggctataccagtgggccttatgcttgtgcagatccattcatggactcagttccccaagggcctagactgggtagcgaggagggcagtagaggaannnnnnnnnnnnnnnnnnnnnnnnnnnnnnnnnnnnnnnnnnnnnnnnnnnnnnnnnnnnnnnnnnnnnnnnnnnnnnnnnnnnnnnnnnnnnnnnnnnnnnnnnnnnnnnnnnnnnnnnnnnnnnnnnnnnnnnnnnnnnnnnnnnnnnnnnnnnnnnnnnnnnnnnnnnnnnnnnnnnnnnnnnnnnnnnnnnnnnnnnnctaagcagtccaaatctttaacttttcttccaaatattttccacccaaaatgggcctgatttgtccccacactgtgggggaaaagcaacaggaccataaattagatctggattcagatctctgccgtggcacttcataggtgtgtgagcctagccaagtctccagcctctctgagcctcatctgtaaaatggaacaataatccctaatttgcaagtcagtcaagacaattagatgtgaacatgctggtcgaaggcctctgtggccctagtatatagcaggtttgctgtaagcacccctttccctcctccattctcttcaccctttcctccacattctcttgacggagagctggtcacaactggtcacatcaccgcagcaagggactgactaatgtcagccagggaggacggctcacttcctggtctgtcacatgcctggggttctcaccagcctcctgataacccattttcttagtgacattcatgctgactcacttggcttgtggtcagttctgaaactagggtctttttgagctctccctttaccccaccactgctgcccagcgtggctctgtggcgtgggaatggagtcagtattacagtacgtagtgttgaggtggccactcccaaggagccagaagctttgctagattggcagcttcatggggtggtgtctgccttgatcactttcatttccccactgtctagaacactgcctggtatattaggtgcttagcaaatggctgttgaatgaattaatgaattttgaactggtccctgtcttccaggtgactctcatctgctctggggcagcatccttggaaaagcagatgagcaaaaccatgagaccttcatctgatttaccaaaaaatgagctctaaactggtgattcccagagtacgggcagtggaaggaccatgccctgtggactcagacttgggtttgaatcctagctctgccactcactggcttggtgactctgagcttccattttctccctggaaaaatgagatatcagtattttccagggttttgtgagaaatacatgcaaatatgtatgtcaaagtgcccagcatagaatggaagtgattatggttaagcatcatttactctttcctttgattgccttctgtagctttggtccaaatctcacctccctcttagagcgtcatcatcgcccagcctgcctccctacccctgtccccatgcccagcaaagacttactctgcctgacacccaggagtcagggttaaaccagcacctaaacttcagcacctcaaattcaggtgcctacaaggaccagccatatgtgaagacaacaggctaagtggggtggtggtggtgatgatgatgatgattactattagagatggtggtctcactcttttgctcaggctggagtacagtggagtcgtcatagctcactgtagcctcaatcttctggtctcaagtgattctcccacctcagcctcctgagtaactgggattataggcatgctctaagtgtgattaagtggcatctctgtctttcatgtttttttaaatttccatttgaaatacttttttaactttttgttttgaaataatttcagacttttccgccaaactgcaaaaatagtacagagttcctgtatgccctttacccaagcatccccagatgttaacatcttacataatcacaataccatgattaagagcaggaaaatccattagacagtgctgccggccaatctgcagatcgtactcaactttcttcaggtgtcccctgatggcctttttctgatccaggatctcattggatttagttgtcatgtctctttagtctccttcaatctgtgacagtttccccatcttttcttgtgctttatgacctgagtgctcttgacaaatgccagccagtttttgttttgttttgttttgtttttttgtagactgcccctcactttggatttgtttgatgttctctcattgttagattgaagctgtaccttttaggcaggatcccccagaagtggtgctgtgccctcctcagtgcggcatatcaggaggcacagggtgccgatgtgtctccatgcttccggtgcccactgtcttcacctggttaagatgatgcctgggccaggcacagtggctcatgcctgtaatcccaatactttgggaggccgaggcgggcagatcgcttgagccctgtagttgaagaccagcctgggcaacatggcaaaaccccatccctacaaaaaaattaaaaaattagccaggcatgatggtgcatccctgtagtcccagctactcgggaggctgaggtgggaggatcgcctgagccttgggaggttgaggctgcagtgagtcatcacatcactgcactccagcctgggtcacagtgagaccctgtccctccagcccccatcaaaaagacgatgtctgccaaatttctccactgcacagttactctttccattttgtaattaataagcgttttctgggggaagtgctttgaaggtatgtcaatatcctatctttatcaaagttttgatttgttcatttctttatttctatgtatgttttatcctttctgttttatccaatggcttataatctgtgatgattgttatttattttgatgctcacattgtctattcttcggccagtgggaaccccaagttttttttttttttttttttttttttaaagacagggcctcaccctgtagcccaggctggagtgcaaggctcaccatagcattaaactcctggattcaaatgatcctcccacctcagcctcttgagtagctaggactataggcacacaccaccacgcccaacttttgttgttgttttttgttgttgttgtttgtagagatgaggtcttgttatgttgcccaggcttttcttgaactcctggcctcaagcgatccccccacctgggcctcccaaactgctggaattacaagcatgagccactgactgtgtctggcctcttcttgtccttttgacatgtccttttcattctttgaacactttcttggtttctgacataagaaggtgctccaggcccatcttgtatttttcctgcccagcctagaatcagccattccaaggagctctgactgctttaagtagagaatagtgattagaagccaaggtttgggtgctcgttacactcactgctattgggctgttgctgttgctggatcttctctatggaaagagctaggaaatgtatgtatatatgatacgtatatatacatgtgcatatttcagtgtttgggtatattgaaaatgattaattcatactgatatttccattaccactataataccatgttttcacctcccttccctgacagtgaggcacctggccccactatccttgtacatgtacatgtttgaccagtctctctgtatgtaacaatctcctatctctctcttcctcaccctgactgaacttagacactctgccccgagccactgctgcctcctcacccagagcagcctctgacttccagttttgaaacaatggttcttatattttttattttttaatttttattttatgtatatttttgagatagggtctcactgtgtgacccaggctggagtacattggcaccatcttagctcactgcagcctcaacctcccaggctcaagtgatcctcccacctcagcctcctgactagctgggactacaggcgcacaccaccatgcccagctaattttgttcattttttttttgtggagatgaggtctctctatgctgcccaggctggtcgcaaactcctattctcaagcagtcctcccacctcagcctcccaaagtgctgggattacaggcaagagccatcgtgtacagcagtttctgtatttttttaaactgcgaggcccagtttctgcttgtcggtccctgatggtgacctggacaaaagctgggctgttagccacctggggtatcgagccccaggacacggctgtcatgctttaatctgcatgggaacttttagatcccctgtgcaccccctcatttcatactcagagaagctgaggcccagcaagggccagggattttctgaaggtctaacacgaagttggggtggagtgaggacgagacccctcccgctgcagccctttcctgctgctcatttctccagtcttaggagaacccacatgccctccccactggcccaggctggccttcctatgacacgaggcggaccacatcctcttccagctccgcaaggcctctccgctcaaatggtcaccgcctaggccccaggcctcatgtcatctgcagacgcgtctcatttgtcctgtagagtgttggcccagcatttgagaatggtgaacttccatgtaaaattccacatttttggcttctcttggacactcagaaggtctggcctcctgagcccgcatctctacctggcaggtgtcagctggggctcggtgatggccccctgctggtttgttttctctccattccctctccccacccctacctcccaaatttgctgacctctcacagtctcccacagtagaccgcccgccggcccccatcgacacttggtgtgagactccctagccacagcctggccctcaggaccctctcctccagccccgccccagttttccgtcctcctctccctgcacatcgggctgtaccctgtgccggagagaggacagcgcccagcttcccagattcggtcctactctgtctttgcttctgctcctctccttgcctgggctgctctttccctccacccatccatcttctccccctcctgctctgtgcacacatcaccccctgtaggaagcttcaccgaggaccccaggccaagtcaggtaccccctcctgagttaatccagcacctcgtgatgaggatgccactaccttctccttccctttctttgcctctaccgctaaactacaaactcactgggccaagggttgatttttatctccttgcctaagggcctaaaagagggggtgtgttagtaggcactgcgtaaatgtttgtcaaacaagcgttaataataatagtaaccacaaatatccacgtggcatttctggggtgccaggctctgcctaagtactttatatgtgctcagtcatttgagcctcaccaccatgctgtgagatagttactgttgttgcccccactttatagacaaagaaactgaggcacagagaggttaagtgacggtcccagggtggtacagtagtggtcatagttgagcccaggcatctgattccacagcacatgctcttacctctcacacacctctcagtgttaaagcggcccccactttctgactaagggatatgagtaaatatggacaggtgagttgcagagacccccaacctcccgaccacaccccagccccagcttctagtaccctcaggggcacaagcacaggtgactgggagctaagcaggcggcagagaaagtggtacctttgaacttggcagcccgcaggaatttttctcccctgaggtcttaggaaactgagcatgtttcacgtgtaattagggtgagcacactgattcaagcatcggcccttacgcaaggtttccaaggcattgcgtcgggtttagctgggcatactcttgtttcccaatcaccaaagaggaaccgcacaccagcctgtcacccccaagggctggagccgccggcctctccagcaagtcaagttctgtctgagagctgggatgccgtgtggactaaggagggttctgtcgatcaaactctgctgtgggagaactgtctgctacgcaggttcaagtgaaggaaacgaagccaagtgtgtggggagcctcccctgcgagctctctgcgtcacatcctttacagacacttctttccctcactcctttccgtggcctcacagggtctagtactaatggtcccatttttacaaaggaggaaacaggctccgagaggtgaagtcgtttgctgaaggtcacatggtgaacgagaggaccagccgagatttgaaccagggtagtctgattccagggtcttaactcttaaatagctgaagcagagccagaattaaacctgtgtctgtctgatttccaaaaccctgaattctcccactacaccacacgatttccctgtgctctggtgggatccataggaaagaaagacatctgtctgcttctgtgagggaaagaaatcacacaagacaggaaccagagccatcaccagctgatgctgagaccgtgggctcctggcaggactttctgttaacctcatgccttagcattcttaagaagagtctccatgaggcagacagcaggagctggggggtgcagccggagtggaaacaggaggaggcaggaaagggaagagggggaggagaggtgacgtggagcaagaatgcagcatcgtcacataactcgagcagggctgtgcgtttccttgcttcctctagcgtcagagtcacccccgattcaggggttccatacattccataattatccagtgcctactctgcaccaggcccatgctagggtttgggaacgtggcagggaacaaaacctaactaggcccctgctctcgcagaagttacactctgatggaagacccaccgatgagtgggagggtcatctggtggttcacgcctgtaatcccagcactttgggaggccaaggtgggcagatcggttgagcttaggagttcgagaccagcctgggcaacatggcaaaaccccgtctctaccaaaaatacaaaaattagccaggcatggtggcacatgcccgtagtcccagctacttgggaggctgagacacgagactcacttgaacctgggaggcagaggttgcagtgagccaagattgcacaactgcactccagcctgggtgacagagcgagaccctgtttaaaaaaaaaaaagaaatgttatgaagaagagatgacaaggggatgtgatctaagggtgttgtggggagcaggggttccatcagagaagcatcttggagaaagtgtcctgaaagagcagaaaaactgtgggaagaaccatggtttgttgaaccatgtgtcacacaagccagcaccactgcctgctgccttgagacccaccctttgtgcccacctcactcctgttccatttgctctccacaggtttgacatctacaggaaggtgcccaaggaccttacgcagccaacgtacaccggggccattagtgagtagccaacctctggccatgccctctgccccatctccactgcctgtgcctgctctctctgtgcagatcatctgggccagggaggaaagaaggaaagacaggagggaggaaagaaatgctgagcatcttgcgggggcccttcaagcatttcctcacttactctctatcctcactgtaacccctcaaggcacaggcaccatctggaaggacatgaaagaaattgtcaagagtagctgccaggctgggcgcggtggctcacgcctgtaatcccaacactttgggaggccaaggcgggtggatcaattgacatcaggagttcgagaccaggctgaccaacatgctgaaaccccgtctctattaaaaatacaaaattagccaggcatggtggtacatgcctgtagtcccatctactcgggaggctgaggcaggagaatcgcttgaaacagggaggtggaggttgcagtgagccgagatcacaccattgcacttcagcctgggcaacaagagcgagactccatctaaaaaaaaacagtagctgcccctgggagaggaattgggcccaggggtaggaaggagatttacttttctctttataccttaaaaatgatttgagttttccaccaaagcatgtttttatccattaaaaaaaaaaatcacaatctcatccagactttgggttctaaagaccattcttcaataaaaggaaccatggctccttggagaaatggctgatttcagggctaggcagggtaaagatagaggagcctggagtgcctggtgtcagcaggacctaggagccaacttgaaagtcagcctgcagcagtttgagtaataaaataaataatgacattattggcttagaagccagagaattaagaaagagttctgtgggtcctaattgatatcaataaatgggggagaagagacaaatccattcagaagaattccaaataatatacaggctgagtatctcttatccaaaatgcttaggacaagtgtctcagattttggatatcagattttagaatatttgcattatacttatcagttgagcatcccacatccaaaaacctgaaatccaaaatgcttcagtgagcatttcctttgagcaacatgttggcactgaaaacgtttcaaattttggagcacttaggattttgggttttcagatttgggatactcaacgtgtatgtagctattctcccatccaggtggtggagtttaattcccctctcttgagtgtggacttagtaactctatttcaaagaatagagaatgggaaggaaaaataaggcctttactgaggaaatatggcaagtgccagtgaggaaccaagtgagaaaggttggcatgaccagtgataagccacgtgcatatcgtgagcccctgataggatgcatggaggcatcttgcctccatgggatcgtaccaaaaaaccacagttcagtctaatcataggaaaactcacaatcccaggtcaggggacattctataggatacttggccagtactcttcaaacatggcaaggccttgaaaaacacaaaagaccgaggaactgtcactgataagagactaaggacccaggatgaaaatgcaaagtggactcccagatcagttcctggaacagaaatctggagtttgtgggaaaactggtgaagcccaaataaagtccgtagccaagttcatggtactgtactaatgttcaattcttcattttgacaaatgtaagatgctaacataacgggaagcccagtgaagggcgtatgggaactgtctgtactacctttgcatctatgattattctacagtaaaaagttttaaaaacaaaccaaagccaccttgcaaacaggggatgctttcgcctcattttcccaatgagaaaatgagctgagagaggtgagctgaaatttcacagctcacagaagatggagccacgactcatactcaggtgggcctccttgcaccccacaagcccccctagtgcctggtgtgggagagggaactgcccccctgatggtcccagccctgctgcctgagcagggtcctgggccgggcagtcggtcatattggagtccacttctcccaggtcaggccattctcagttgggggaggaccttggggatccggctgggcttgttgaagctgcaagatgcctttgagagccctgaggaagggacagcacagccccgtggcaggatgcatgtcacacaggctctgtgttcgggcagagcaaggttcatcctcccatttagcagcagtgtgactgagcaagtcactcccctctctgagcctcagtttcctgatctggggattaaatgtgtcccgggatgtgtcttgtgcagggcacgtactaacccctcagtgcatggatgactctccttttcttctcactgtcctcccggagcctgcaacacatgagggcctgtggcctgagaagctgtgcagctttgtgccttgactcccgaggaaaggatatggaggggaccatgagaggaaagagccttggtagtttatgaacctgatccaaaaaaatcaaatgaggcttcctgccccattcctaccgtccaccagtggctccatcctcttccctcttctccatctctgcagtctctcccttgtctggtatgtttaacagtcaggtgtgtatttttctagagttttaaaaaatatatttaggctgttttttttttttgagatggagtctcgctctgtcccccaggctggagtacagtggtgggatctcggttcactgcaacttctgcctcccgggttcaagcaattcttgtgcctcagcctccccgagtagctgggactacggatgcccaccaccatgccaagctaatttttgtatttttagtagagacgaggcttcaccatgttggccaggctggtctcgaactcctgacctcaagtgatccgcctgcctcggcctcccaaagtgctgggattccaggcatgagccactgcacctggcctatttaggctttgatatacctatatcactgtttgaaacacaaaagggagcatactctgcacactgttcttcccctgcctttcttctgctgatacatcctgggcacctttcctgccagcggataaacagccaccacattcttctttccagctgtgtcacattctgttatctggctgacctacggggcctgtggccagcccctgagggtagacattccccattctggtttgttggagatccttgtccatatctttttgtatccttgtacagttatttctgtaaggtaacttccctagaagaggaattactgggttaaagagtatggtttttttttttttttttttttttgaaacttacaaggtcctgccaaagggccctccagggacatggtctgatagacagtttcagccacagcacaggagacagcaaatttccttacacaagaggaaaggcgtgaggcataggaagccagcccttagctaccatttagtgaataaatatttattaaccaggtccttgggccaggcgccatgccaagccctgggactgtgctgatgaacggggcttccatctttgtccttgaggagcacacgactgggcagggcgggctgacttggacacacaccatttcattactttgtgatgggtgctattaataactgaaggaaagatcagggcattggagacttacagctcagggtttaaatgttgcctcctccacttacgtgactgtgtgaccttggacaaattccttgacctctcggagccttgggtctcaggtccagtgccccctttggctggccgtaccaggtttcctaccatcaagccttctcctggggtcacattcctactgtccgatgcctgagtcagtttcagaagaagtctggagttagagagccttagagtcttgcccaaacatggactgaaaaaccttcatcaagccttcagtatcagaaggcctttctggttgaaatagtttttacctcctgttgtgttttttattcattcattcaataaatatttattttataccttctctgagccaggcactgtgctagtctctgaggccacagtggcattgtgacctggtctctgtcctcctcctctatctggggtaagggtaacacacgccatgaatgcgtgtgatcgggacctttggaccacttgagtctctgccgagtagacttggcacttattgtgtccacctgctgggctgaccaggcttagtccgagccttgaaaaagcacacagatttcaggaggcctttccatcccatccccccggctctggtgctctggtgtggatagaattagaaccctgggacacacgtctacaagcatgaacacggaaagtagctaggagacctgaacccatccaagttagcaccgaccttcatgaacacatcctgttttgtttcgttttttttgagacagaatttcactcttgttgcccagcctgaagtgcaatggtgtgatctcggctcactacaacctccgcctctcggattcaagtggttctcctgtctcagcctcccaagtggttgggattacaggcgcctgccaccgcacctggctaatttttgtatttttagtagagatgggttttcaccgtgttggccaggctgttctcaaactcctgacctcaagtgatccgtctgcctcggcctcccaaagtgctgggattataggcatgagccaccatgcccggcaacactccctattttgtgcctgttcatcattacagcatccaatgggttgtcggggcttgggggaggagggtgtaaaagattctgaaatgtgggtcctatatgatcctggtcagaaagttgcaagcttccaaagcaaggatgttttgcctgctcagttttccaagaggtttaatagcctcagtttgcgggtgagaaagggaagaacaggagccaggaaatttggattgatagctgatctcttccagtggatttgttcagcagctggagaaaacaatttgaaatttatctctctgccgttcgaaaatgaaggaaaacacggccactcagtaaactgatgtggaacctgtttcgacatagattgctgagtgagcaaagcacggtggaaaagagtgtgcccattacgctgctgttcacttagggggatatatatatatatatatatatatatatatatatatatatgtgtgtgtgtgtgtgtgtgtgtgtgtgtgtgtgtgtgtgtgtgtgtgtatatatatatatatatatatatatttaaatgtccatggatggacacatgaaactgtaacagggaatcgggggctgcagatcaggagagacagactcactttttttatacagctggatttttttttttttataatacgcattgttaactatttttttctttaaaaaatttttttttctcactgtcttatggtgctgatgatacttttttttttttttttttttttttaagtaaaacctttgaatgcttccccggtacaactttttctttttttttttttttttttgagacggagtcttgctcttttacccaggctggagtgcagtggcacgatctcggctcactgcaacctctgcctcctgggttcaagtgattctcctgcctcagcctctggagtagctgggactacaggcgcctgccacaacacctggctaatttttgtatttttagtagggacggggtttcaccgtgttggtcaggctggtctcgaactcttgacttcgtgatccgcccgcctcggcctcccaaagtgctggggttacaggcatgagccaccgcgcctggccaactttttcaaagtttgggagaaattgggagtaattctagtatcccccatgtctcagggtggttggagagactcagtgagcagtctggggacatcctgcccttcactcggagcctaagttcttgaggttccttttctcagggctttgcctctaaaacatatggcttccagtcctgcctctcctgcccccacacagtgaagccatgggccagcctccttgtctcactgtgcctccatttccacacccttaacatgggcaccgcccccctcaaggtggtgggagtgtgaagtgacaggacatctgttaatgcagtcacaacagggcacatagtaagtgcccagcaaacactctctttcttctcccttccctcggaatgcatctttggctgtttgttttgaagacagatagatggctatttgctttgaagatagatcaatcaatcgatcaatgtttggctgtttgttttagataggtagataggcagatcgatatatgtaaatagatacagactaagaaaaataatagagataactggctgtcacatccgtgacgctggctctgccagtccaggtgcaggctgcggagaatgcagcagaatcagcaagagggattgggaagtcttctttgcaggaaactaagggtcaatcaatgtgttgaatcactttccccagatcaccaaacccttcccacatctctctgatgtaagtcctactcatgagctgatgctcaggtaattattacctgccgggctctgtttcaagctcaatccttgtgttgttgagatcctcagagaagccctataaggcaggtactaccattgctgccatttacaggtgaggaagtggaggcacaaagaggttaagtaactcacttagggccatgcagcaggtgagcagtggggccccagcgcagtccttagtgagctcttgcccactaagtgcctctgggataaactcaggtgtggcgtattcagccctcattttgtatcctgggagctgactctctgccgtacacaatacctgttaggccccagccccaggccaggcactggaactccagagtatttgtctttctggatatcagtctagtgggagaaacggccacagataaccgataaaatgtgggacatgttcaagcagaggctgggaacacagacaaaagagtgaccagctccacctctgggagtaggggaagcttcccatcaaaagggacatgtgagtcgggcctgggaggatgagtaggagttcagcaagcagagaggataaccatggaggaggagggatgatgagtccaggcaaaggaacagaaatgaaaggcatatttagggaatagcatgcagctctctgtgggtgggtggttagacattgtggggagtgtcaggagatggggctggtgagtggagttgagggccggactctggggcacttgttatgtcctgcccccaaggagtgactccaaggtccacaaaccccagtgtctttaggtgccaggcagatgagagaaagacaacagacatggccgaccccagaactctgttctacactctgcattttaaacatattggaccggccgggtgtagtggctcacacctgtaatcccagcactttgggaggctgaggcgggcggttcacttgagatcaggagttcaagaccagcccggccaacatggtgaaaccccgtctctactaaaaataaaaaaattagctgggtgtcgtagcaggcacctgtaatcccagctacttgggaggctgaggcagaagaatcgtttgaacccaggaggtggaagttgcagtgagccgagattgcgccactgcactccagcctgggcaacagagtctcaaaagtaaagaaataataagcatattggaccattcttcacttccataaagaattatttcttctcttgaagcaccgctgtctatagccccttctaaggacaggggcaccgtgtggatggcaccacagagggtggtgagaaacagccacagactctgcctcagcctcagaaccagagaggcagaagggagtggtggggcctgtggcaaactcatgggctccgaccctccgtgggaacaagggtgagatgttctggagaagccagaatgctggccttttatgtgaaatctgctgactgttcaaggtggactccagattgtgaaatatgttgtcactcgagccaaacagaacacatttgtgggccaccggtttgcagcctctacttttggctggcctttgcattaaagagctctcctggaaggaagcggggccagccccaggaggattgctcatgtcggcaggttgatccacacctggaggccagaccagtaccccaaaggcagggggtggggctgcttcatattgaggctcgagtcagaaggggctctggagggtctgtgggcacagccccacacccttgtcctggggcctctttcctcttccctctaggctggtctcccttcgtcagtgcccaccacccttaacagtttgcatttctgttgtttcttccagtctccatctgctgctgcctcttcatcctcttcctcttcctctcggagctcaccggatttataacgacagaagtgtaagtcatactttcccgatggggcattccaggatgttctgggaccccagacaagaagagggaggggtctttggccaggtttggtggctaacacctgtaatcccaacactttgggaggccgaggcgggcggatcacctgaggtcaggagttggagaccagcctggccaacatgctgataccctgtctacactaaaaatacaaaaattagctgggcgtggtggcgggcacctataatcccagctactggggaggctgaggcaggagaattgcttgaccctgggaggcagaggttgcagtgaaccaagagtgcgccactgcactccagcctgaatgacaaagcaagaccctgtttcaaaaaaaaaaaaaaaagagagagagaggagtcttaaaaaggagagcaagttccaaaccttccaacttctgtctccaggcctgtggcatcggttgctcttctgtttcttaaaaggactttaaagtgagagcaaaagtgaatattgccttgttaaagctgaagggaacattttggttccattccgtgggggttctcctgggctcaaagatgaacagaaataatttgcacatctctgccatccctttgtttggccagtgggctttttttccctctgaatcatcacagggtcatttgatgtgagagccgaagagttcagtgaaactaatgggtacagcttcctaccggagggggcgaggttgctgacatcagcgcccggccccctggactaacccccttcccatttctcaggcccacacttggtgaggaatcggtgcaggcttcctggcagtggctgacgcagagttaatccattcctgattcctagaattatctgttgtctggataacctagtaaacgctctggggtgtgtgtaacagaatgccattagaattatgcagtcacgacctcatcggacgcccctctgtgatggaattagacccaggagcttcctgcctttggcactggcttgaggcttcaaagcctcttcatttctgtgtttacagcccggaaagtcatcacggagctgggccctggccacccactctcctgctcaacactggaattttctttttcactaatgggatttcttggtttcctttgcctccactcagccacaagacaataggaaactaaatacatagctgcttagcccaagaagactctcattatacaagcattaccacctttagttctcaaacagcctcaggagggagctgccccctctttacaaagaggaaattgaggcccagggaggtggagggacctgcccacagccatacagttaggagctggctcccagccctgcctatctccctagcccacatgtgtttgaccagcacactgaaaggcctatgagacaggagggctggtctcaccttgtttctgggtatacctttcagccctcccctggcatgggagagtttgcctttcctggtcactctgatcctgttttaaccctgatggcgccaaagcccaggggaccttttacagtggtgggaagagtacaagataaggcattgggagacccagggccaggtctctgcttaattactactttgctgtgtgaccctatgcaagttgccgaacccctctgggtctcagtattggtagccaaatgaaggagagtagaccagagtcagagctcccttccagctctgggagaggttggtctgcttcccaagacatgaccctgtggccatgcagggttcgaagaaggggttttattccccccaggcctctaatgggagatggccatgtccaagtcaagcatcttcccctctgtacaactcagtcactggacatcttaggatcaccctatcatgaatcagagctcgaagcagggagagcggcaagaggttgagacttgctaatgttatgaggtacctgttgtatgccaggcacccactggcctctgcaggctgtaccccaccctctaggaggggacctgcttggcttggcaggcctgtcatgttctgagcaaggtgacagaggcacacatgtgtcatctgctgagaccaggcaccaggcaggtggctttatgtgctgtgggcaggacaccagcaggtgcaaagggcctcaggcagggatgacctggtgtatgtgaaggcaggaagaaggccaatcagccaggtcaaagtgagcaagcggagagggtaggaggtagagcaggcaggacggagaggggccaggccttctgagctgccaggtagaattgggagttacttctttttttttttttttttttttttggagacggagtctcgctctgtcgtccaggctgtagtgcagtggcgtgatctcggctcactgcaagctccgcctcccgagttcaagagattcttgtgctttgcctcctgagtaactggaattacaggcaagcaccaccatgtccagctaatttttgtatttttagtagagacagcctttcaccattttggtgaggctggtctcgaactcctgacctcaaatgatccacccgcctcagcctgtaatcccaggctgggattacaggcgtgagccactgcgcctagcctgggactcacttcttgatgatgagctcgtggagcccagggctggacctgcacactcactgctctgtggctccacacatggaggagctgaaaacgccagtggtagacacagtcaacaagcaaacaaaactagactgtatcgatcaggggcaagtactccaaagacaagaactaaagcagggcaggaggtagaaaatgagatggctgcaggtacatgatattttatgaggatcaaacaagattatttagctgaaagctaacttaatatagtgcggctatactttaatatcataaggtccatatctcttcgtgcatttattcatttcctacatagtctgcatctaactctaaaaaggttttaaggccgctccgcaccaggcatataagtactcagggaatgtgaattccttgtcccctcttccgctttgagttaagaagatgcctctcttgcctgctgctgacagcgtgtggggtggcattcccagctcatcccacatgaggtggggcactgaggcaatgggctgccaacaagtgagttttgacgtcacagcttgaggctcgagcaggtggggccccacccgcagaatgcccgggagcattggggaagggcccttccagcaagcccagacaactcatgcagcttcccaagggcagggctgcttctttctgaagagcacagtgtgttcccactgctccccattcccccgtgccaggacttcctctccctctctcccagcggcaccccggacgctctgatcccaccgagtccctggagaggtacaaagcttagggatgaggggaggaagggggccaggtgcagtggctcacacctgtaatcccagcactttgaaaagccaaggccagaggatcacttagcccaggagttcgagaccagcctggacaacacagtgagatcctgtctctgcaaaaaaattttaaaaacattagttagccgtggacacacacacctgtagtcccagctacttgggaggctgaggtgggaggatcacttgagctcaagagatccaggctgcagtgagccatgattgcaccacggcactccagcctgggagacagagcgagaccctatctcaaaaaaaaaaaacaaaaaaaaacatgaggacattttttgagcatttgccttgagtccaaccctgtgctaagtcagcggctggagagagggagggaggcagagatgaatagagagatctgtccggagctgaggccagatgctccagctatgaagatgcagtgaccctaatgtccccttccctccttactaaggtataggagttgcccgaagggcctccgcaggatgagccctaagacttacagagcaatcgagaggagaaagcatcacatctttggggtcttccagttgtcagaagcttgtggcccccaggaagccctacaggtttgggaacaactgaaggtcacagttctcgtcttctgggtggctggccctctgtggcaggtttgtggccacagtggggtcagtgccccctcccgccaccatgagattgtaacttaaggaaatgaggtcaccgttggttggatcaacatggctccagccccagcctgtggttatcagtgacataagacgcttattctggcctgggcctggtggggggtgagggggaggcacatttgtttgggtggttgggctccaacctggctttggacaggccgttaattatccttgggaaagaggccccacagagtgttctgaaactccgtgttttcagggagcaggcccctcctcaggcaacctggccacagaatgttccagcctctgactgcccagtctctgactgctctgaataattattaacctcatgaggatttatactaataaaatatagtaactggaactctccactgatagtttataatgtaatataactcatggtaccttccatactataactcatggatttatagtgtgcatgccaacacctaggtcagcactttatttttatttttattttttgtttgtttgttttttgaaacagggcctcattctgttgcccgggctggagggcagtggctcaattatggctcaatgtagcctcgacctccagggcgatccttctgcctcagcctcccgagtagctgggactacaggcatgagccaccatgcctggctaattttttaattctttgtagagacaggggtctccctgtatgttacccaggctggtctcaaacttctgggctcaagcaattctcccaccttggcctcccaaagtgctgggattataggcatgcaggctgcccccggcaggtcagcacttcatgatggtcatctcattggtcatcgcagaaccccttgaggcaactactactgttcaccccatgttacagctggggaaactgaggcaccaggcggccaaaaccacatgaagcagtaagtggtgtaactggagtcaaacacgggtctgtgatgctgaagcccaggctcagcacctcccctctgttgtaccccacttccctggccccagcatttcagggccccaggctcatgggagccactgctttttgatcagaatagttgactggaggacttggatgcacccttctagggtgaggtggccaaacaggcagatggaagcctgggaggtgggagcttggaggtcacctggaggtcacggtgttctcacaggctccccgtaggaggcccggagtggggagcagtggcttaaccaggaggaggagctggaagtctccaggttgcctgccttgagcctgggttgtgagccaggctgggtagagggccccaggcatcccattaaggagcatgaaggacattgctcttagcaataggaggcctgagggcgtctgagtgtggagtgacgggtttatgtctcagacagctcaccccttgtgaagatgggtttggtgtggggccacccagaggccaaagccctggtgggagctgggggatgacccaagtcagaggggccgagggtgctgggactttggctttggagcaggggtgggcagaacccggtgactggctgtcgagggatgtattttagacatccacctggttggtaatagatgcacatacttttacctggacgactcaggatttgaaactcaaggctccggagcgcgtgcttgcagaatctccatccctccctccaccccaccccaagcccttgcggcaggcctcaccgccgcctaagtttccattcgatcaaattttgaagcatagaggtcagagacttcaggcaggaatctgaactatttaagtgctcttcaaaaagcaaataaaattgttttgtatagatgtcatcgaactcatgcctcagactagaatttcaaggccctccaccacattccatttacactccccccacccacacctccccaggcccttgcgtacctctccctacaaggccactgtccacccacacccccaccctcccacgcactcgcctgactccctgacgccatctggcgtcccccacctggaatgtgctcccgactgctccaccagcgcgtgccttccctgcatcctgggagttctgctgaggactccctcctccactcaggctcattccactgaagtttgtgagcacacgctctgtgctgaggctcagggagccctcgtcctgggggtgttgacgggagtgggagaggcttgtgggacagacgcaactggacccctaagcacccctgtaccctgcaggcacctgggccctggtgggaggggacacacctgaagattatgaaaaaggactaggatgcctgcatcacatgtccactgagggccaccggcccctcagcttttcaccgattcccatcccatccaggcagtgcaatgccttggaaagagcatgggctctgggccccctgtccctgggctcagatcctgcctctgcctcctcttggtcctatgatcttggccagccagctgtgctcctctgagcctggtttcatcgacgtgaagggagaatagtacccttattaaacactggatcaactccttgagcatcgatattaataataatgataaaaaccatggacatttattgagcacttactgtttactaagaccacacttagcattgctcttgttctcatttgatcttctcagcaaccccatagcaacccctatgattgtccccattttacatctggggaaactgatggatgggaagccccttgcccaagtcaatcagccaagaggtggcagagccaggattcgaaccctggtagcctaggctttgaaccctggtagcctaggcttcgaaccctggtagcctaggcttcccctgcactgctgtattttctttaccaagaagggtgtggaatcggccctcaagagagagatgagtctcacacatacacacacacacacacacacacacattgactcacactaacatacacacactcactcactctcctgccctggggcagccaacagcttgacttggcagtcatccagcagccctgtgaagtagacggaatctttatccttattttcctctttttctctcctttcctctctccctccttcctttcctttcttattttcttattttagtgaggtatgtgtaacttacatacagcaaagcatacaaatattaaggtagaggcctgatgaattttcacctgtgtttacacacgtaaccatcactctgatgaagacataatacattctgtcaccaaagaagggtcccttgagcccctcccagtcagtagcccccaccactattattctgacttccattgccatagattaattttgctgattttcgaaccgattgaaagcttttccagttttacagatgaggaaactgaggctcagagaggtgaagcagtgtgtcctaggtctcccagctcctaagtggcagagccaggaggtgagcccacaccggtctgccactgcccccataggccttcccactgcccacactggtgacaggggagtcaggcccatggaagtcctcaaaccacaatgaatccacaaaaaacatttccttttcttccaggtgggttgatttctggcagcccgttggccttttaaaatcagttcagccctagccaatgaagttagttagccttggcaggcccctgccatggggtggttgtgggtgagctcgtggcgctggctggggtggcaggaagccagcagccctggaacatttgccttggacacgaaggcgaaggcggctttattgacctcatcaggcagcccaggtgattgaattgtgtttatctcacagcctggggccctccaggaaggagcctgggagcagccagttctggccttacataaccagtctggccagagcgcctcaggccgtccctgcccagcaccgcagcccccttgttctgggtggccctctagccctgcggagcctgttctctgcttattctggttaggaagacagggacccacgcctgggagaggcttcttggggccttgtgggtgagctcaccttggcgccacacctgggattcactttgctcttggctgaggtcacctccagagggttgccagtggatgacatcatcccacaatccctcagtgctgtgcggaggcccagcctcgccaggtgggaaaggtgagttgcttcaaggaagagtctcaggcagcttcctggctgggaagggaagcccaggctctccttagttgactgtgtgttaatcacccagcaatttcattactcaacagctctccagagttgcacattacagctggggtagaaattgggtgctgaaggccaggcagagcatttggctgtagggaggccgatcctcctcgggcctgttaccggcgggtctttgttcttagacctggggttcttggcctcacggattccaaggaatggaacgttgggccatgcggtgagtgttacagctctattggaagccgtgggtcacggaagagaactgtggaacccagcgactagtgtgcagctcatttaggacaaacccgggcacttagccacgcaggaacaatggccagcctctagtccgatcaggagcggcaatgggagcctcgctgaataagcacagcggacaccctgccggatccagaggggtggaagtcagcggtgggtctgtgacgactgcgatcagcaccacgagctaaagctcagctcgagccggaacaaacacagaccagaagagtgtgtagttgcaagacttaatagagtgaaaacagaactcccatacaaaggagggaccaaaagggggttgcccaatccagctcgaatgcctgggtttatatccccatcattgtccctccccctgtgctctcaggcgatagctgatttgactgtttctttacctcctgcttttagcctaattggtatttcagtgagctccctttactacctgattggtcaggtgtgagctgagttagaagcccggtgtttaaaggtgggagtggtcaccttccccagctagggttaggaattcttatttggcctaggaaatccagctagtcctgtctgtcataacctcctgggctcctgtttgcctctctccctccagctcctttgctcttggtggcctctgattggggccaacactacaagcaaggtcaagcgcaggtccgtgtctcccctctcccatcctaaggcttcccaggaccagggccctccttcattttcttccttgaccctgatgctgaggagagggctgggaggcagcctgagctgtggaaaggctgggttgagattctagctcggccatttcctagcatgtgactccggggatgggacacaccctctccgagcctgttccctggttttaagatggggctcagggcatttcacaggcgcacatgggacagcatgaatgcacgtagtaggcctcccccagcttaacgagtggaggcccatctgttgcactcttgtctctgggaatatccttgtgggccccacagagaagccccaggtgtcttttcagagcccaccgttccttgtgaacagcatcacaccgggtgctaggggcgcaaagatgtggtcttagtaaaaacgaaattcctttgccttggtctgactcattctttccctaagatgtggccatttacaaagctctcttggagtcttcattgcttagatagggcagttctcttttatttatagcctagggactggacccaaggggcctaataaatgtttaaaataaccacagcccagccacctgaagcactgccccttcagccgccccctaggccaggcctttagatttggttccctctgggtggggggcattatcggggaatcagatgcggccatcagacatccagcagctacttggggatgcctcaagacacctgggctcagcacagcttctggcactcagcacctctccctcctgctggtcctgttcctcttccaagggctctcagcccaaagaatgggtccaggaagaaacacagcagtgtgtctgcattcccccctcacctcaccctcctccgcccagtcccatccatcagcaagtcccgcctgctctacgtgggttcctacagccctcctcctctccattcccatcccaccccatccaaggcgccgccatcccctgcctggtctccctcttgcacagcagcccctccagtgggtcttccttgcagcagccagagggagcccgtgtgagtgggagcctgaccccgtggctgtgctcatatcaagcctaaaggcctcggccaggcacggtggctcatgcctgtaatcccagcactttgggaggccgaggcaggcagatcacctgaggtcaggagttcaagaccagcctggccaacctggtgaaaccccacctctactaaaaatacaaaaattagccaggcatggtggcgcatgccagtagtcccagctacttgggaggctgagggaggagaatcgcttgaacccgggaggcggaggttgcagtgagccgagatcgcgccactgcactccagcctgagggacagagcgagactctgtcaaaaaaaaaaaaagtataaaggcctcgtgcagcctccttacactgcaaccacggtgaccttcattcagttccccaaagcagccatgccctccccaacctccaggcctttgcacatgctgccaggatgatgcctacgcatcccccagacctcaatcacacctcagagaggtcttcccagccccttctccccaaaggtcagtggccctgtagtccctgtcatggccccctgcagctttctgtcaagtactaatcagcgttgggggtggcagcatatttaggggctgagtgatgtctggttcttgtgtctataagcttgcagaaggtagagacagcatctgtctgattcattgctgcttctggctcctgacaggtagtaggtactcaaaaaagtatttgttgagcaaatttggattgctaacagatgccaacactgtgctgctgacagcaaggtgacatggctgtctgtggagccacctgcccctaaatatggccgatgcggtcgacagaataatgaccccctgccccctgtgatgtctaggtccctgtccctgatgtgtgtggccgtgttaccttgcattcaaaaggaactttgcaaatgtgattacattaaggatctcgagatggggagaggatcctgggttagccgggtggactggatgaaatcacaagagttcctgtaagagagaggtggaggccaggcacagtggctcacgcctgtaatcccagcactttgggaggctgaggcgggggcgggggggnnnnnnnnnnnnnnnnnnnnnnnnnnnnnnnnnnnnnnnnnnnnnnnnnnnnnnnnnnnnnnnnnnnnnnnnnnnnnnnnnnnnnnnnnngggggtgcatcatgaggtcaggagttcgggaccagccttgccaatatggtgaaaccccatctctactaaaaatacaaaaattagctggagtggtggcacgcacctgtagtcacagctactcgggaggctgaggcagaataattgcttggatctgggagatggaggttggagtgagccgagatcgcgccactgcactccagcctgggtaacagagtgagactctgtctcaaaaaataaaaaaagagagaggtggaggtcagagaagggggaagccgctggctttggaactgggagaaggggccacaagcctaggcagcgcctagaagctgaaaaaggcaagaaaatgcattctcccaagaacacagcccgttttagacttctgacctccaaaagcgtaagacaataaatgtgtgttggtttaagccattcccgttgtgataatttgttacagcagccacaggaaattaatacagccgtcaagtcgtttctcagaaccggttctgcccctacggatgggcatcagggaattcctggcttcccggctgggggaaggggacctcaagagaggaggctgtaaggtcctctgtgcctgctggcgccaggccctgatcccttataagacccctatttctcattttagtgttcaaaccaccttattcgtagtgggtggtgttatccccacttaacaggtgtgttcacagaggtgagcataggaagtgccagaaccagaatttgaacttgaatctgtctgaaagatatgctcttaccaccgtgctatctgaccccaccccttctctttcctgagccccagacctcccctcttttttttttttttttttgagacggagtttcactcttgttgcccaggctggagtgcagtggcgcaatctcggctcactgcaacctcagcctcctgggttcgtgattttcagcctcccaagtagctgggatttcaggcatgcgccaccacgcccagctaattttgtatttttagtagagatgaggtttcaccatgttggtcaggctagtcttgaactcctgacctcaggtgacccacccaccttgacctcccaaagtgctgggataacaggcatgagcctctgcgcccagcccagccctcccgtcctgagaggtaaggctgcacttgaagagtgcagcctagacccgtgcctgagggcacaggaggtgcaggctctgcccaggtggagtctgggttatctaagttgtggtcaccaagtgaagtgatccccggctgtcccccgcagctgagatctttgccgccatctcaacaaaggttcctatacttgtctttcccctagtgtgaacgagctctatgtcgatgacccagacaaggacagcggtggcaagatcgacgtcagtctgaacatcagtttacccaatctgcactgcgagtgtgagtactccacgcagcccctccctccagcaggacacctccttagggcaaatgtgtgtgtgcagaaatggcaagatctccaggacaagccaagccaacatatggttctccccactcttttttggaggagaatataattgcgtatgcatgcacttggaggttttctggcataataaacacaagacactactcataggggttaaccctggagagcagctgatttggtgcagggaggtgggatgtctcttagggtcatgttacagcttcgcagcagagcctgagagtctcatgcaagtgacttgttgaggggaggaagctgtaagggagaaacgcaggatagggcagtacgacaggataagcaaagatgtgtgttcagctgaagtccaaactcagcctgatctcacaggatgctgtggggtgtgaatgacaccatagcatttgtcacacccaatagcaatgggaccaggctgttattatccatgtcattgggtaatggctgcagagtggtgtgcgtggcaggggtcatatcacctcccaagcatctcaagcaagaagacctccgttcagccaagagtattcatctggagaagggcgcagctctgagtcattggcagctgacacctagagaagctggagcggtccaccatccatgagagagtgcaggacagggctcaagagcatctgcaacagtgaagggctgggagattccctttttgacttcacacctattttgttttaaccaaaagaatgaattacttcttttttttttttttttttttttgagacggagtttcactcctgtcacccaggccggagtgcaatggcacgatcttggctcactgcaacctctgcctcctgggttcaagcgattcttctgcctcagcctcccgagtagctgggattacaggtgcgcaccaccatgccaagctaatttttgtatttttagtagagacggggtttcaccatgttggccaggctggtctcgaacccctgacctcaggtgatccacccacctcagcctcccaaagtgctgagattacaggcatgagccaccgtgcctggcccagaatgaattacttctacaaaacaaaactcatttgaagtctgatttggagtcagatcctggctcctttgctggctaaaactgtgaccttggctagggtgacctctccgagcctcagattcctcatctgcaaaatgggcttagtaatgtctgttgtctgaggttcttgggagaatctaatgccatggtccctagacttgtcagcgagtggactgggcgccctctcctggactggggttccagccgtccctctgcccagcctggcacagagcctgctgcaggcccttctctccccaccccctcttcctgttaaaggacacagctgagagaacactgggtgcatctccggccagagataggaagagtctcagccctgtcattgcttttggtgagatttacgtcacaattttgaatcctcgctgggccccaagccagggaacctgttgaaataggtcggtcttattttttgttattttttttctttcacttagaaaaataattcatctggcagattctcattcaggagtgactgtatctctggaacaaggaaattcttagtcagaccagaggactgggacaagtgtggtaggaaagggaagagatgtggttccaggaggggccaggcaacctccaccccattccctgccatgccctgctggatctgtggggctataacctgaacccccaaccccctcacccctgttagagcccagcattctggcttttctttaaaagaacttcacatttttattataggaaaaaacgcatgctcatcattgtacttctggagaacacagggaagcaaaagagatcacccataactctgccacccgacagcagtgttggtgacattttgacatcattctgtccagctggccttcctttctgtgtttctgaacatagctgagatcgtactgcatgtatgatctcatatcctgcttttaaaaataatattcttcattatacaactaatagactatatttcaatcttaagacatacattcaaaaatacaaaaataatatgttttttaaaaagcaaaagtacccctcccctgtcccccttcttgtcccagcatgccatcttccccaaaggacacctctgctagcaggtggggcccccgttccctacccctacatgtgtgtgcgtgtctgtgaacatatattgggtttggggttgtttttgttgttattgttgttttttctttttacataattaattgggaccctaccatatgggaaccttctggagtttctttttttttttttttctagctagtgtcttggagctgttctcatattactcataatatgagtaaaataataacagctgccatttattccattcttccaggccaggccctgtcctgcgtcctttggctatattaaatccactgggatttgaggtatcttagcagaatggctgaagggtgggggctcagaagcaaatccacctggatttcattccaggctctgctgtttcctagtggtgaggtctctgtgcctcagttgccctagatgtagaatgggactgataatattatcttccccacaggggtgtttaaatggtgttttgttttgttttgagacagagtctcacactgtcacccaggctggagtgcgatggcgcgatcttagctcactgcaacctccgcctcccgggttcaagccattctcctgcctcagcctcctgagtagctgggattacaggtgcccgccaccgtgcccggctaattttttgtattcttagtagagatggggtttcactactttggccaggttggtctcaaactcctgaccttgtgatccacccgcctcagcctcccaaagttctgggattacaggcgtgagccaccgcgcccagccaagaaggtgtgttcttatataaaaggcacttagaagagagtctagcacgtagtaagtgctattttacttttcttttctttctttctttctttttttttttgagatagagtttttctctgttgcccaggctggagtacagtggcatgatctcagctcactgcaacctccacctcccaggttcaagcgattgtcctgcctcagcctcccgagtagctgggattacaggcacctgccaccatgcccagctaatgttttgtggttttagtagagatggggttcgccatattggccaggctggtctcgaactgctggcctcaagttatccgcccaccttggcctcccaaagtgctgcgattaccggcgtgagccactgtgcccagtcctgttttacttttctttaaccctcacaacaagcctgtgatagaagaggaaactgaggcacagagattaggtaacctgctcgaggtctcagcgctagtaactcagccactgatctgctctgagcctcctccacgcacctgcatttagcccattctttgtacctgccgcacggcactgggaagagggctgttccactggctccagtgacaagcagttgaattgcttccagttgccactatttcagataaggttgcctgagcagctttgcacacacatctggacacacattgtggatctagaggacaggctgccaacattggaactgctgagtgaaaagcggacctgcttgtgttttctctaaacttcacattataccattggcatttcccatgtcctgtggacccgtgagggtcatttcgaatggctccagcacgttcccttctatggctggatcctcacttacttctctgtcctcatcgaggaacacagagttgttcccaattttcccttttaaggttgtccctctttaaaattgcttccagctgttcttcctctgtatggcacctcctttctagcgctcctgccagggaaattcctacatttccatagttcacagggatcatctcaccactggctacttggaccatctctggggatgcagttggcattggcctgcccattttacagatggggaagccatctgagtcccagtgaggtgacagagggcagggcctatcttttccctttgtgcattcctggtgcttatcatagggctggtagcataggcgatgggtaaaggaaggtgtgaatgaatgaataagtgaatgatggatgaatggatggggggcctgagcctattcaccccataaacccaaaaactctctgaaggccaggaacggtggcctacacttgtaatcccagcactttgggaggctgaggcaggtggatcacctgaggtcagaagttcaagaccagcctggccaacatggtgaaaccccgtctctactaaaaatacaaaaaaaatttttttgtataggcgggcacctataatcccagctacttgggaggctgaggcaggagaattgcttgaatgcaggaggcggaggttgcagtgagtcgagagcatgccattgcacaccagcctgggcaagagagcaagactctgtctcaaaaaaaaaaaaaaaaaaaaaaaaataattacaaagactatctgagatacaagagctaacatttattaagcactttccacctagcgttcatcagaccctaagcattttctacatctatgaactatttgatccccataatctttcaaggagggttcaattatggtcagccccccatcttacagagaaagaaactgaggcatccagaggttaagtacctgaggcaggacccagattcagaggaccagtatggcagaccccagggtggccccgggacccctactatgcactgcccccctcgcctcacgtttagcggagtcattgtcctgtcccctgtagtctttggaccccagaccatgagctcctggaggtccccagcccggcctgcccctgcaatggatgaatgaaggctcccagagagaacaggctggcccccatcctcccgcgtctctgggtttgtgactgttgtctccctttggctcctgcagtggttgggcttgacattcaggatgagatgggcaggcacgaagtgggccacatcgacaactccatgaagatcccgctgaacaatggggcaggctgccgcttcgaggggcagttcagcatcaacaaggtatggaagccctgcctcagccctttctacctgctcccctttcctgctgtctccccgctccctggaaactggttgtggaggcactcactcgacctgaccctgacacagcccccagcaagcgagggttcgtgtccagctgcctggccgttcctgctgagaatctggatgggggtccaggctccctggggttttaagcccctgatggctggttcaggaaggagctactcttctctccagtgagggggacaatgatgagaagacctgaggatttgcagcccccagccctgggttcaagtcccagctctaccccttcttggcccctacaagtcacttgacccatcttaggctgagggtgtgatggcgataatagtatcacgataccacccacttcacaaagtttgtgtggggattaaatgagctaatgcagattcattcattcagaaaaatttttgaatggcacgttctgtgttccagggtcggtgataggctctggggcagcgttcctgggctggtggggctcccattctggtagagggagacagtctacaaaccagaaagcatcagggatgctaagtgcagtgatgaggaataaagccaaggggagtgagatgaggtgggcttgaaagtaccttgtccgctcagaaggaccattcaaggttcactgttgttttgtcctcagaaccaggagcttcagatcctaagtcaagtgggtgaacgcagtgcccttgggagggccgaggcacccggtggcagctggcagggttttgctcagcacgtgccggccttcctcgaagctcggtactgtcacagtggagcctctcaacaacgctgtgaggcagcaccatttgacaggttaggatgctggggcccagagaggttaagtgtcttgcccgaggtcacacagctatctgcatgtcccacaactccccttcccagccccagccaaactgagccactggccactcctggcttctccttgtccctcctgcagcctctgctcagaacgcccttcctccagaccctgacacctgagctggggttgcaaagtcactggccacatccagcccaaagataaattttgtttgtccagtatagcatttaactgcatcagaaccagtatgaaaagaccaggaatccagatttctggcttttaaaagtcagaggctctcactacactgggtccgtgttcccgctatgacaatgacctggcaccaatgggcagtgttcccctttagagagggtgtgtgctgtcccttcccacagtccctggcaggcggctggaaggccaggcctggtcatctgtcaagcagggtggacttcttacgtgacagttcagggctcccttaagtgctaaagcagaagctgcaaggctttcttaaggtttcgagtgttgctgggagaaatctgctgcatgttgtgggttaaagggagtctctcaccagcccaggccctcaggaggaggagataccaggaggcagggatgctgggggtcgtggttcactgggggctctctctgcccatgagctgccacacagcacctttgccatgccccgtaatttggattttatggtggttgtgatggaaagccatttgagggttttgaacagggaggcaatgtaatcagatttatgccttagaactggactatccaataggttgccaccagccacataaggctatttaaattaattcaaattaaatgtacaattcagtcactcattctcatcaaccacatttcaagtgctcaaagccacgtgctggctaggggccacagcgttagacagtgcagagagaaagcacttccatcgctgaggaaagttctgctggaccgcacacccttagaaggatggctctggtggccgggcgcggtggctcaaacctgtaatcccagcactttgggaggccgaggtgggtggatcacgaggtcaggagatcgagaccatcccggctaacatggtgaaaccctgcctctactaaaaatacaaaaaaaaacaaaattagccgggcgtggttgcgggcacctgtagtcccagctactcaggaggctgaggcgggagaatggcatgaacccgggaggtggagcttgcagtgagccaagatcgtaccactgcactccagtctgggcgacagagtgagactccatctcaaaacaaacaaaaaaaggatggggctgggctggagagggtggcaggcagtggttgtggcagtggagctggggagatgtggtcggattagggaggtagaatcaataagactcagtgaagaatcggatgtgggggtaagggcacatgtggaagcaaagaaacctttgacgtctttgtcttgacaaccgggtggtcctgtttctagacatggaagcttagaaaagcctggagtctgtgggaagtaggtagggctgggcactggtcattccactctggtttcctttggggttcccattaggtgtctacagggagaggtgaaattggaagttggaggtgtggagagttcaggagagggttctggaccacagatgttgaggtgggagtcattagtgaatagatgatgttggaagtcatgggtcctcagagtgggggctccttaagcctccaggccagcagcatcagcatcacctgggagattgttaggaatgcagattctcaggcccccctaagacccaccgactctgtgctagaacaagcgcccctcagagattctgatgccactgaagtttgaggagcattggtttaagcaagattacctacggagaggctgtagatccgtgttctaaacctggggtccacagacacccccaagaagagcggattgaatgcaagagatctatgaagttggatgggggaaaaattgacatctttatttttgctaaactcgatctaaagtttagcatttccatctgcgatgaatgtaggccacaaaccacagtagtattagcagtgcctgggacctcctcaacaacagaaattgccggtatttatagcacgttacagttgttgcagataatttccagagactgtttatatgcaccactgttttaaaattacggtgattggccaggtgcagtggctcacacctgtaatcccagcactttgggaggccaaagtgggtggatcacttgaggagttcaagaccagcctggtcaacatgtcaaaaccctgtacctacaaaaaaatacaaaagttaaccaagcctatgcttgtagtcacagctactcgggaggccgaggtgggagggtcttctgagcccagggaggtagaggcttcagtgagctgagatcgcaccaccacactccagcctgggtgacagagtgaaacccttaatcaatcagtcaataaaaattacagtaattattagacccaccactaggtcatcttatttgatgcatcagtaaagcagcatattcaaatgtggatttttaaatattttaattactatttaaatatctctttactttgtaatcctatgcattttacgcattaaaacattttaagcatttaaaacgtaggtatcattagactggcaaaggatcatccgtggcaccaaaagccttaagaacctaaggtctggagagaattgcagtttgaggactgagttctggcgccccgcccagtcacttcgaggtggggagatgcgggggtaacaaaaggtgcaagaaggggcagtcgaacaggaaggaggaagcaaaggctgggcggagcctgcagcctggaaaagaacatatgtatagatatcaaagagcagggctggcgctaccaggctcaggaaggcaggcttggaatggacagtgatctaagtgctgcagagagtgctccagaaaacgctgatgatgaggagagaaggggccgctgcaggagccacgtccttacgaagcaatgggagccagacgcaggccacagttgggggtttaaggccttggagaggttcacagtgccggcaggcaggtggggggttggtgggggacctctgctgggcctccataccctccctctgtccccacctcatcctcttggggaaccactactcacccacaggcctcagctgatgtgggtccctcaggggaagtcctccctccccttccctgcccacccacattcactccccaccacgcccctcatcacgctgcggctgctgcctgtgcctcctccttgacttggcctctccctttgaccactccactcaggctttcgtgctattgagcatccacctcacgcctggctctgtgcttggcgctgggctgcaatgggagagaaacagccatgctccccgccgttggtggcccatgttctataacggggggacagccagtgctcaggtaaacaggaaatatgtgattttgataaagcagccgtgaagagaatgacggggtgctgtggtggagaatgaaggaggagacccctgaggttacaaaggaagccctgtctgaagactgaagatgaagatgcacagatgaacagacgtacacgcacacctcctcactgtgggccccccgcccccggggagatgcaaccacctgggctgaaaaaatatatgtaccccagatggtgaccaagaagggatcgtgcttattcaagcacctggagtgacaacccacgagacagccctgccaccaagccctcccacctcttggcaaacacgcccaagactgcagtctgctccccttagaatgggctgtgctggagcccccagccagctctgggtgaacttgtcctttggggtcagacagacctgtggtcaaggatcccggctaccgtggtcactggttgaatgactctgggcagtttagcttctctgagcctcaggttcctcatctgtagaatggggataataatacctcacaggctgtgaaacatgaacaaactctgcagtagagactggacaagcatcctggcctgcctcatctcccgtcagtgcaaagtttccatgacctcatcagctggcacccaccttacaagtgcgcctgtggaaggcacatggagggcgtccaagaaatgggccttctctggtcaggggagtgccagggagtctttgaaaggctcacaccagcctttcttagacccgcgttatggctgccacgtactaggttcttacccagccctttccacatattagctcctttagtcctcacagtagcctggaggaaactgaggcacaggaggttaagtgacctggtcaaggtcacgcagccaggattttaacacaggcagcctagcaccagggccctggccctctgagctcactgcctgtggctgcttctcccaacatcttggttacacatgtcatgaccagctgtgtctgtgtgccccaggtcacagcctagggcaccctctgccccatactcctggagggagtagagaccgtcccccaccccagcccagccactttccctttgaggaaccgcccatcaagaggtgctcaaagaagccaccagggtccatgtgctgtgatggcaaggtcagcagccagcccccgcacctctctcccagcatcaggctgagacttgtcccatggcctccttatccgacccccaggaagttgaccagcagccagatgtcagagtttgcgtgttttgagcagcagcggcagcctcaccagagaccccacggtgacctcgtttcatcagccagccccgcaggaggaggacaggatggggtgaggggtatggggcctggctccagctatatgtttttaaaatccatcagagacactgacgtaggttcctaagtcacaggctctaaaagcgttgctgtttctttcttcagcccagcatgtgctggcatgagtcagccacctgtgatggatttggtgtggagggggagtgggttcctgagtcacagcctcgcgcggcccggcaggggtggcaggtgctgaggggacagccttcttgactcacttcactcccggagcacgcggcccaggccccaatcccagttctgaactctgccatggcccgatctgcggaaggccctgtgtcactgcgtagaaaacctctgggaggacacacgccttatggctgtgggtttcttactcccaggggtggtcagcaacagggtctttagtctgactgtgtctcatgactgttttatcatgaaaatgtacccaggcattatttttatcggtgaaaatgaggcataaatgttaaaacccacagtgggcttttcctcacgccctgcctgtgagtgttccctcttccgggagggcccttcttggttggctccgatgacaaacatgttcaccctacaaacccgatctgaggccagctgcgggctgctttgtatgcatcacctcaatgaatcctcccagtaatcttctggctttacgcccatttcgctgatggagaaactgaggcatggagtggttactgacctcgcctaaggctccccagctaggaagtggggctgggcttggggccaagtgtagaactcagagcaaccgctctactatgggttattgggtccctgaagcaggcgatgctgtccctcgagggagatcttgccacgcctttgtttctgctccactcctgacccagcaagtgtcccttctccactgtagcctgcagctcgctccactgcgagtttgctgaggccgaggctacaggctgtcagcttgatgcctcccctgtcagccacaggctcgggccctgctgaagtaggaatattcctgcaggaagtccccaactttgtgtttgaaacagacatgcttacaaaatcagactttgatgggctgctgcacgataagctatattccctcctcggacacagctcgcacagtcttcttcattgggctggaataaggtaacccccgagtttttcagtgtggcatctggggacctttgataaacagccccaactcctcccttgtgcctctttgtttcctgctgctgccagcaccgccacctccgtctcatttggagttcaataataccagactcttagttccttagacagcccacatgctgggcagtttctgtcctctgcacctgttcatgctgttccctctgcccagatgcctttcgctctcttcctgagtaatgcagactcatcttcagagccttaacacaggatgtccttccccctgggaagccctccctgaatacagcctgcaccctcaattgagccgggggccttccctgtaacccccatggtctgcaaattcctctgggccagggtggatcccacagagtctcattgtctgttccaagtctgtgtcacaggggcttggccaaggccagattcttgtctgctcatctccccagttccggcatctcctgaaggactggcgccatgtggccatcagcccaggctgcggaggtagatggcatccaggcatcagaggagggagcagtgcgtccaacagacgtgagctgagactgcagctctcgacatgtgaccttagcaagtttcttcactgctctgagcctccattttcttttctgtaaaatgggaattatcagatgacaaagtcaaaggattcagtgttgtttgtttagtcattcattcattcaaaaagtgtctattgagcacctgctatgtgtcggagtctggggagcacagcagggcgtggacatgctaatgggaggaggcagacgagaacaggatgggtatgagatggcaggtgatcccagaggctgtagcaggtaaggggatggggaatgggggccagggtgctcttttgcacaggtggacgtggagggcctctctgttgggccctgagggtccgagggagggccatgtggaagagggtcccaggaaggggtgcaggcacaaaggcctaaaatggggccacactggatgctgttcccggcacggcaggagaccagacaggaagcagcagaggacacagcagcaggaggccaagcggtggggacacgatgcttggccagcggccagatgtggcctgtgggccaccacgaggacatggacctggactctgagagaatagaagccgtggagggttctgggcagaggagtgatgagatctgatgtagggtttaaaaagatcttaacagtcattattgggaaaaggcccaggctgtggggaacatggaagctgggagcccagggaggagcctgccattgttgtccatgaagagacgaccttggaccagggcagcagagaagaggtcaggcgccaggtgtgtttggaaggtggagctaacagggtttcagctgatggatgggacgtcgggagtgagaaaggggggttccaggatcataccaagggttctagtctgagcctctaggaggaggaggaggaggagggttccaggatcataccaagggttctagtctgagcatctgggaggaggaggaggaggagggttccaggatcataccaagggttctagtctgagcatctgggaggagggaggagggttccaggatcataccaagggttctagtctgagcatctgggaggaggaggagggttccaggatcatactaagggttctagtctaagcatctgggaggaggagggggaggagggggaggaggagggacttcgtgctgaaacaaggagaagctgcagtggctcctgccacatggttgtcaccagcatcctttgttctgtaaatactcatccagcacctcttgctggcttggctctgcgagggcttgagacccagggaagagatgaggctaccacagtctgtccatcagggatcccccgtctagggcactggggcaaacttgggtaggaaatgataggggtttggagtctgaggaatccccattagtctgcaggctcaaaggtcatcccccagctgactgtggggtcagccgcccagaatccacagagctggagggggagcagctgccatgagtcctggctttgtgcccgtcgcccagatgggcacttcacatgcaccctctcaccagatagtcctggcagccccctcggaagctatggtagtgcccccattctgcagatgaggagcctgaggcccagagagatggggtgactcctttgcacagttgaaaatgatacaagcaggatccaaacccagatctgcctgattccagtgtcctccctggatcacacagggtgaggccccaatgttccgccccctggagaagtcaaccaaactcctgaaactcacatttctcccccaggtccccggcaacttccacgtgtccacacacagtgccacagcccagccacagaacccagacatgacgcatgtcatccacaagctctcctttggggacacgctacaggtgagcaggggacactcgagatggcatggccgggggtgggccttcaggggctctgtcacccagtgccctctgccctctctgggcactaggaagagttaccgttaaggtgacatctaagccaagcctggaagggtaagaagggtttcaccaggaacagaacagggaaatgggtcctaggcagggggcgtctcaaacatcacccctctcctagagcgcccagctggtggttttcatgtgaaagaccctcaaggttactttcagaaaaatggatcagtaagcgtatgtgacacggcatgttctgtgccgagatggtccagggcacaagggctcgcttggcagctgagagggcccagagcacttgcctgaaatgggagccggcaggtggggtgtgtggggtgcgagagacccgtggtagactgaggaaggtggagactgaaggtctggttggtgactcagagcacccatctgcaatgaggaagatggacccaggaggcaagactataggcagggaggtgagggaagggcccagaccgaggcaggtggaggggagaggagcagcggtctcgcattgccacgtgcaggggcaaaacagaaggacacagaaactacagtcccaagtttagtcattagtggggtggaaatctgatttttttaaaaaaatgtacagaacttagcttagggcccatccatccattcattttctgtccatccatctagtcaacaaatatttacaaagtacctaccgtgtccaggccttgcataccttggtgaggacaaacatggtccctgcccacctggagcttccagtctaggggggaagacagatgttgatcaaataatggtacaggccaggtgcggtggctcactcctgtaatcccagcactttgggaggctgaagcgggcgaactgcttgaggtcagaagtttgagaccagccttgccaacatggtgaaactctgtctctactaaaaatacaaaaattagccgggcgtggtggcaggcacctgtgatcccagctactcaggaggctgaggcaggagaatcacttgaacctgggaggtggagattgcagtgagctggtatcatgccactgcactccagcctgggagaaagagtaagactcctcccaaaaaaagaaaaaataaaaataaaaataaatggtacaaataaatgtgagataaagccatgtcacatgacaatggaagagaacattctagccttcttgtctctgtaaccaccgttctcatgggttagaaacgaagccttcacacggtcagtctcaagacagcaaatagacaaacttccttttccttgttgagaaattgcagttccttccagttgttgaggaattgcttgttgagaacatgcaggtgtgttaagtgctcagtaaacatcagccgcctgagaccaggatcagggattatgccaccccgctgctgcccactgctcctggagtggccacagaatcatgtccccacctacctctccgatgtctcctccttccttctattcaaacacctcactctccttcctcctgggggccacgtgggcctgtctccatacttaagcctttgtacatgctgcttgccagtttaacttcccactttcctccagatcttggtgtcaatgtcatttcctccaggaaggcctccagggtgtctagctcgataacccctgttaaccatgcccatggtagcatgctccatttaccaggtatgccttgtccttctttagatgttccttgaggccaacctggtttcccattgtcctcagagaaaaggtgagatgtggttttcagccccactctacagcagcccaccccactgcccggaggagggttttcttcacatctgctatacgttctctgcagcagacatgatggggggcccacagctctggggcatccctgcctggactcctctatgggcctttcagaggaccctgggatctcaggagaaactttctgggacccagaatccatgttcacttgaattttctgtgtgacttcatggaaagagtccagcttagtgtcagacagacctgatttcagagtttagcttagccacttaccagccgggcaagttttggtgtctttccaagccttgatttgctcttctgtaaaatgggcccaataatacatcattaggggcatgaaatgaaattatatgaaggggccaggatggagcagcacatagtaggggctagagatgggaaacaagcttgtgcctactatgtgccaggcccctgctgcctcttgctccccacaaatccgctggagcccccttttacacattggtagggttcctagaccaggtggtacctggccatcccccacaaccagggccaggcctggaggtggaggtgtcctggggaccatcccctcactgcatttttccacaggtccagaacatccacggagctttcaatgctctcgggggagcagacagactcacctccaaccgtatgtatccctgctgggaacagccttctgctccaagatgcccagtacagcaggcagggagggggagggcagagaggtgggggtgcctgtccagcacccactccaaggcagggaggctgctgctcacactccattcccacagctaaccagtgggaaggtggacccagccccgtccagacccagaccctgatggagaaggaagaaggcttgtcccggggcacagcagacgcacgcacgcagtggataccagctattaccattattgttgctctcatcacagccacatcatcatccttagtggaactaattacctaagatcccacaggggagctatggcagaaccaggatctgttctgcctccaggtcgcaccgtgagaacaggtctgtgggtggcccagtcagctgtgaccacatggctgcctcccccacacctcactctcctcctgctcagactcctcccatcgacagtggctcctcctagagtcctcgccctccttagctccctggcaccttggcccagatcaaagagaaccgcacatctccacacgcagacaggagagcacgcatacctttcgtgcacaccaacacacatgagctcacatggccccagacacgtgcacagaatgggcccgggaggcctgtgtgctcaagcagacccgcagacccactgctgcacagggtacctggatttttcttatttcctcacctgagctcaccttttaacccacatcttttcttattatttcctgaaatgcgtttgctctcccattgtcagggatccaaggcaaagaaaacatccctctgtgacctgcccccccgacaaatcgaacctcatttttctgtgtccctgtgagtccttgtccataagcagaactcacttttctttttttccaaggcatggattgcagtttaccgtctgctttttgtacttgaccttattacatagccacgattttcttactttccagttgtaatgggagcacagttgtccatcttgcagctctgctgtgcttttttttttttttttttgagacggagtcttactgtgtcacccaggctggagtgcagtggcacagtctcggctcactgcaacctcagcctcccgggttcaagcaattctcctgtctcagtctcccgagcagctgggattacaggtgcctgccacaatgcccagctaattttctgtatttttagttgagacagggtttcaccacgttggccaggctggtcttgaactcctgacctcaggtgatctgtccccactctgctctgcttttctaagtcattgtcttctcaccgaaagtgtctgtcgtttcctgtgtttcactgtggcaataatgcctctgatatgtacagggttggcgctctgttacccgattgctttccagctgtgtctggttcccattcatgctgcctccagcaacggataagtatacggcagcacctccttatttgagtgcaaatgtccggttgtaatagaggtagatgattcttggtgtggtgccgtggtcattgtcgttttgtgtcatggtaacatgtcatccgacgtcggccgtccacaaatgtctgcagctacgatggaccctcagctgctggacaggaaagaggatcaagctaagaaggcccagagtgtgcaagcagagagagggtgtggacagaaaaccttgccttctccagggctagtggcgaaagctatctcaggctggctcaagtggagagaaaaaagcatgagatcaagcaatggacagctggggaagggctggcttttatttcctcagctcccaagctcagtccctggcactgggccgttgcctttgtaggtccctctgtgcccaggtcttgctatgggggttgtttcttggcattaaggtctcagttcaaacgccaccgtctccaagaagccctcactggtcaccctatctaaagtaaccctcactcctaaggacaaacctgttttttcttcctagcatagaccactctctgaaatcaccttgttctcccagtcatctgctgcccttggctgttgcgccagctataacatggcactctgccttgcccactgctttgtccccaggacccagccctgtacccagggtatggtaggtataagaggcctggaggccactatggaagagctcctgccagatggtggtggagtgcggtcatgaggacctcggcctccagtgtccccctccactctttcccagccctgtggtcttgggaaagtcatttaactctgctaagcctcagtttctgcatctgtaaagtgggaagaatcctctccaccttaagccttgctatgaggattaatgagatgcgtgtacagagtttagtacacggcctgccacattgtgagtgctcaataaatgttggccgttctcttcattatcgtcagcagctaacttcaggaacgagatcccctagggcagaatctaaggagaaactttcctatatcaaattgtatcttgtattgtggtactgaattgtttaactggtcctgaatgatataactggaatgaaaccagcttgtcatgtatatgtatacacataatatgggctgtcatatatatatgtgtgtgtgtgtgtgtgtgtgtgtatataagtatacacacacatacatatatatgggctgctggttttaagaatgcagattctgggccccactccagtggcgggatagggatgaaacaagattggccatacgctggtaattgctgaagttgggaaatgggtacgtgggagtccattatacaattccctatgttttaggtttgaatttttctgtaagaagattttgcgggtaggggaggaggagtgagcttgaagggaatgtgggctggcctagaccaggttggagccagcagtctctaggaatggtcagctcacaaggaatccacatgggtgtaattaactgcagtgtctccagtgggcatttggcaaattgtatcaaaggccttaaaaatggtcattgcctttgagtcatcaattgtactcataggagagtaagctaaggaaataattaagagagtgtacaaaaatctaggaaaataatgttcattaggtcattgtttataaaattgaaaatgaggaaccacgtcagtgtccagccatagggggttgactgagcatggtaactgcccaagatgagcgaggtgtgtcaggaccttactggcagtcaggcagcaaagatttattgagcacctactatatgctgggcattgggctaggttctggggatagagagatgaataaaacaaactctgcagagcttatgttctgtgtcttagacctgaaaagttgatcatgatgttcagttcttagaaaaagatggctgggcgcggtggctaacgcctgtaatcccagcactttgggaggccaagtcgggtggatcacgaggtcaggagttcaagaccagcctggccaagatggtgaaacccccatctctactaaaaatacaaaaaattagccaggcgtggtggcaggcgcctgtagtcccagctactcaggaggctgaggaaggagaatcacttgaacccagagggtggaggttgcagtgagccgagatcgtgccactgcactccagcctgggtgacagagtgaaactccgtttcaaaaaaaaaaaaaaagatacggtatggtcctattttaggaaaatacaaatatatgtataaacatgtctggcagtttatatgtgagactgtgaaccatagttttctgaggatggtgaatttatggtgattttttgttttgtccttggtgatcacctgtgttttgtacaatttttttttttttgagatggagnnnnnnnnnnnnnnnnnnnnnnnnnnnnnnnnnnnnnnccacctcccgggttcaagcgattctcctgcctcagcctccctagtagccgggactacaggtgtgtgccaccaggcttggctaatttttgtatttttagtagagatggggtttcaccatgttggccaggttggtcttgaactcctcacctcaagtgatcctcccacctcggcctccctaagtgctgggattacaggcgtgagccaccacatccggccttgtacaaattttaacaagaaatattacaggggtgattttgataaggcattcactttttcattccttcaagtttttaacctagggcaatgggcgtttggacaccactatcaagcgtggtcttgggctcttgttttaaaaatgcaaattctgagctccacccttgacccatttggcgggatgctcctggaaagaggtccaggtgtctttttattccaaatgattcgactgcttctgacatctgagaaccattacagggttgaacagagggatgttggagtcttcatggactgggctctgcggctgcaggacttttctcgggttttcagaggaacctactcaaaacaattcaagaagcacttcctttgcttactgagatatggctttggcaggaaggggcagggagggagtgtcagggcagtgaatgctgtctgcattcccagccttcttacagaagaggactgactcgactctgcgaccaggcttagaacccacaggcctaaatttctgtgttattttagctctgtagtccgtgacccgagattgtggaaggcccatgagcttcctgtaagcatcccagaaggcccaggagagttcatacctttcctgagtgatatttggcagctctgggccagcattctatcagcccagcattggactccagttacctcacgcttatcagcagctgattcatctgtgctttcattcatgcccctgtccagtcatccttccatccgttcattcattcagtaagcatttgccacggtccacttggtaccaggccctgcacggggctctggggacacagagttgagtaaggctccatccctgccttcagcagctcccccatccaggaagaactgatctgccgttgatttctttccccattctcagttcatcagtgcttcattggtgcagtttttctggttgataggctcttttctttttaatactgaaacctagtttgttttaaaagtaaaactattcagacaatgtcagaggatgtacaatgaaatgggatctttctcaaatcctgccttcctccccagaagctaaagctgcccgtggttccttgggcatctttccagataattctcctatatatttacatggatacagagtgtctcctcctcccccaatccatggacacatgtgtatcctgtcccatgacttggttcttttccctgttggagaatagctgctcctagcacccacacttttttttttttttttttttttgagacagagtcttgctctatcgcccaggctggagtgcagtggcatgaccttagctcactgcaacctccgcctcccaggttcaagcgattctcctgcctcagcctcctgagtagctgggattacaggcacctgccaccacgcctggctaatttttgaatttttagtagagacggggtttcaccatcttgggcaggctggtctcgaactcctgactgcagatgatccacccgcctcggcctcccaaagtgctgggattacaggcgtgagccaccacgcctggccaacactcactctttcatggttgctctattgatggacatttgggttgtttccagaattttaatgatgtgcacagtgcaggaggaaagatcctgatggatagagtctcccaattcccggtatccaaggggagaagatgaagagcagttggttggtggtaaaactggggaatgagccccctgccgtgcccagggaatttaggcttaggattgaaatgacatagagctgtcagcgggcagtgcccgtccccctgcttcattctgctgtgtccttcccgcagccctggcctcccacgactacatcctgaagattgtgcccacggtttatgaggacaagagtggcaagcagcggtactcctaccagtacacggtggccaacaaggtgcgcgggcggtggctgggccgagctgtgtgcggcggcgccctctgctgacggagagcagagatgacaggcggctgcaccgacgcactttcttctgattcctttctggaggcctttcctgggggttagcttgggccaggcgctgtccctgggtaaaattgaaaagcccagtccctgccatgtggcagtctcagagtcaaggagaacagatctaaccaggagatagggtgtgatgcgtttgacaaagagcaggtagtctctgtcctacaaaggtcctggggttgcaggtctcaaacagccctgcatctggtccgagtccttcagacacagacccctgggtgctcaacacagacagacactcctgctctcagggcacaggcactttacccaaactcatgaggctactgagtcacaccaagatggctgttgattaatttgctgttgattgacaggggtgtccccaggaccccaacactcaaagtcatggagaagacgccaggccttagtgggcagcagagcatggtcagagtctgcagagtgggatgacccagcaattagtggtctcaagacaagacagccttgggcttccctgggggtatcccaccaatgggacatgaatacttgaaacctgttggttgaaatgcccctgctagaccctggcggatgggtttttcccacttaccaccaggactgtcctttttcttctgttccaaggctgcccaaaccccttataagtgatacctgtttagctcagttaattataacaacagtaggaggcatagctgtcactcattgagtacttcctgggggctagacatgctaagctctcttcttccgtcttctcaatcatcatgacagctctgatgttgagactgttattgagcccattttgttgatttgaccattgaggcactgagaggtggttgtagagctataaagtggctgagtggggattagaacaggttttccttgggctccagagcctggcttcttgatcacctcacgcctcggtctgaggaaggggctgtgagtctgcccacctgcgagctgctctctgtccaatgacttagtccctctgttctgactcaccctaaattgatgttcccgggagccctgtttcttttattcactgtttcacagggggcatctcattgtaaccctcacatgctcatagcagctaacagatggaaaagcacagatgcaagctcaggaccacgctgcagttcaaattccagctcagtcattcactagctattgaccccggacatgtcacatagccactgtgtgcctcagtttactcattcataaaatggagatgatactttataagagtgctgtcacatgaggcaatgttttcaaaaatgcctagcccaccaaaaaaaaaaagcctttaggtaagtgatactgactgctgctatttttcactctttttctctgtccctcagctctgggttgtgacccagacagtcatcctgccccagcagctctcctggagaaagctggtcttcccttgcacaaagctccttttcccaatgctttggcaaggcccagcagccaaatacagcttgcttagcttctctatggctgcagccgcactctgccctgggagcaggcagcagcgacccagcgggaggtcagggctcagtgttacttacccccggagtggcctgggctcctcaggctcagcatgtggggttgggggtaccccagtggttcaatttggcctccagttgttgcagactttagcaccttgaagtgcccaaactggagagatcccagggatcatcatcccaggcccatccgtgtttagatggggaagccaagtccctgagggagggaggggctggcccaaggatgcactgttagctcagcctcgtagtatccttagtccctgctgtgtgcattctcaggaaggttggtggcagggcggggccttctggctttgcagttcagtctattcctctgaagaagctagcccactccccacgtggcatttacacccatcacacacacacacacactgggactcctgcttattcatcatgtgtggctcagaatgtcccctccccagtctcccagatgccgcccgggagaatgggtcattcattcattcccctcaactctccatgttcctccatcccacatgcatgatgtcacagtgttagggatattcttatgtcttcctccttctgcagactgcgactccctctgggtaaagggcaggacttgctcacctcggggtccccagcagccagccatgggccaccacagtggaggcgttcagcaaaccattgttgaataaatgaatggatttcgcgtggcccagaggttgaaggaggcaatagccaaaaattgcacttttccttttacagctctgctttctaatttattttctgattctggtgctgcttgcagctcacttggtcaatttctaaacaaccaagggtatcaaaaatgcccagctgtgcacggcagagttcagggcctccaggggaagggatgtgagagagggagtgggggagtctggcttcgtggggcagagagggaggaaagccctttctggagggttgctggggggccctctgcaatccagtccccgccccccctgagacacagtttgtacttctgattcttatatcctctaccccaggaatacgtcgcctacagccacacgggccgcatcatccctgcaatctggttccgctacgacctcagccccatcacggtcaagtacacagagagacggcagccgctgtacagattcatcaccacggtgagtggcctggggcagtgggtggggccctgagccagccaccctgcgcctgctctgggcccctttccttggcacccctcacctgttctcgctgaaacaggaggcagcctgcagggctaggggctctggctgggcacaggaggcttcgaccccaaggatgctgagaaatgttgtcagaaacacatcagtatcgatgacgttttgtctagaaagtattttccagaggggaatgccctgaaatccatttaattcctgaagcaaatctccatatggttccactagatgtttaggattttctccagctttttattgttatggaaattattcttagcagagtttatcctttaatgtgtaaattttgcaccaaagattgaactcatttttttttccaggtctaatttccagttatagctgctgatagggtccgatttttccctttccttcctctctgttctctcttttttgccatggtctctaccacatccagttttctctagggcagattcaagctgatgttagttttcctttatgctgattatttctatcatgtctactgtttcctggcctcccattcagaaggtccttagggtcagaacaggagggtcagggtgcccttcttcacccaagaggcccaggaggtactgaagaagccagagttagctgaggtggaagagacagggtggctatccctacttcacagatttggaaactgagacctaaagataaatatggcattgggaggcccttatgcttctgtacttcttcatgcttgtaatgatggttcaagatcaagggccttggctctttcatttcccgcaataactaggtcagtattagtcaggactctgttaccgaagatccagaaccagaccttgagctggcctgaggagtagaaggcctcaggcatggctggatccagcctccaacattgccaggagtaggtctctatcttcggatctgctttccgctacactggcttcatcttcaagtagaatttaccagtagaaatggcctctttctcagtcattctaaccaagtcctagataggacagagctctcactggcccagctcaggcctcatgccatccttgtggcctgggaaatcaaatgctctggttggccaggcttaggccctgtaccctctctggtgtcaaccccatccaaaccgcagggacacagattgtgaggaatgaggtttctcaagagaaaaggcaggggccagctactggaagaggaaagagtgggtgccaggaggcagaacagtgggatgttgtgacagggtctctgccttctcatctgtgaagtaagaacgatcatctctgttcctgccacctcccagggccttgtgggactcagaggagattgtgaaaggagaagctgtttgcagatgtgaaaagccaagtaggacggggcacagtggctcacacttgtagtcccagcagtttgggaggctgaggcgggaggatcgcttgaggccaggagtttgaaaccagcctgggcaacattgtgaaggcttgtctctaagaatcttcttaaattagctggatacggtggtatatgcacctgtagtcccagctacttaggaggctgaggtgagaggatcacttgagcccaggattttaaggttagagtgagtcatgatcgtgccacttcactctagcctgggcaacagagcgagaccctttctctaaaaaacaaaaatccccagaaaacagacagagagatacaaagggtgtcataagtctggtgcttacatgagcctcagaacagttttttgctgttctctttgaccacataaaagttagaaactcctgttcaacaaacggcacataacataaagcaaaaatctcacacgcagcctgggaaaagatacttgccatccaaatgggaaaggggtagccttcagaattcatatgtaaagaactcctacagatcagtaagaaaaagttaacaaccaaaaaagcagacaaggccaaggaccagctcttcacagaggagatgatattggcagtgaaaagatgcccaagttcactagaaattggagggatgggatttaaaacaagactcaattcaggccagacgtggtagctcacacctgtaatcccagcactctgggaggtggaagcaggaggatgacttgaggccaggagtttgaaaccagcctggtcaccgcagcaagaccccctccctacaaaagaaaagttaaaaaattagctagacatagtggtgcatgcctgtagtttcagctagttgggaggctgaggtgggaggattgcttgagcgtgggaggttgacactgcagtgggccatgatggcgccactgccctccagcctgggcaacagtgagacccggtctcagaaaaataaaaaaattaaaagacccagttgaatcctattggactgacagaaattgaaaacttgcccggctcacacctgtaattccaggactttgggaggccgaggcgggcagatcacctgaggtcaggagttcaagaccagcctagccaacatgacaaaacactactaaaaatacaaaaattagcggggcatggtggtgggcgcctgtaatcccagctacttgggaggctgaggtgggagaattacttgaacctgggagggagaggttgcggtgagccaggatcactccagtgcactccagcctgggcaacagagtgagactccgtctcaaaaaaaaaaaagaaagaaattgaaaacctgctactacaaagattgggaagatgtgaagccctgggaacccacatgtgctattggtgtgcagggacatgggtacagctaccctgaggggagatgcacaaaccccaggacccaaaaaatcaggggatttgtgagcaaatgatttaacccaagaccccgcagggtagcacaccccaagtgggtcttggtgctgattcttactgcagctctcctactccacacccacgataagccacacacaaagatacaagtaggttccctggtgcctccatgaaggtctagaccactcctcagaggccctagggtctgtacattgactatagcagagaaaccccctccagccatgcctcacagtagggttcagaaggctcttttctgtccccgtttctgtttgctcctgtatggaaagcagctgagactctgggcattacaatcatttggcaatggccgggcacggtggcttatgcctgtaatcccagcactttgggaggccgaggcgggggatcacttgaggtcaggagttcaagaccagcctggccaacatggcaaaacctcgtctctagttaaaatacaaaaattagctgagcatgggggtgggcacttgtagtcccagctactcgggaggctgaggccggagaatcccttgaaacccagaaggcggacgttgcagtgagctgagctgatgccactgcactccagcctgggtaccagagcgagactctatctcaaaaaaaaaaagaaaaaaaaaaagaaatcggccgggcacggtggctcacgcctgtaatcccaacactttgggaggctgaggcgggcggatcaccaggtcgggagtttgagaccagcctgaccaacattgtgaaaccccatctccactaaaagtacaaaaaattagccgggcatggtggcacatgcttgtagtcccagctacttgggagggtgaggcaggagaattgcttgaacctggcagacagaggttgcagtgagccgagatcacgccactgcactcgggtctgggcgatagagtgagactccatctcaaaaaaaaaaagaaaaaagaaatcacttggcaagtggctgagaaatgaagcaacttcatttattcacttaacatttgctagaattcactatgttccggcccccgtagcaggcaccagggtcagctgaatcatacgcagtccctgccttgaaggagccccctgctggaggggcagatgagtgagcacagggagctgtgaccggctctagtggagatgtgcgccagacactgcaggcaaacaagagggcgccatcccctttgtttgggaagctctaagaatagaaccctgtgatgggccttgagctgaggaggaagggcccgggaaagggaatgctatgcgcagaggtgcccagtataacatgtcgtatgaagtccatgccaccccctttggcaggtgacaaactccccagtgagccgctgaccttctgagagcaggaggctccaagaagccacggggaagacccttccttcgtcagagacccaatgcctctatgactcctccttctcttcctgtccttggccaccagcctgtcctccatttctgccccatccacctctgctcaagcgtgggctggcaaagccctgggcttgtgggccacactgctgcagggaacctcctgacatcattagcctggtggttcttctgaaggccctgtgccaccaccttggttgccatggtaaccgtggggtcagctctgaaggagccagccggccggctgtccctggcagatggcgtcattgtggagcttcaaaggcccttgtcacagggcagcagatgtggggatgacgccagcactcagacacacacgtacacacacggcacaaagatccctgggagccctcggagggcggggtggggccaggatggaagtggaggcacctgctgtggcttctctttctctctttttaaaaatcaaacacttgcgtgcaaagcccctaaacggcaaatgggggcctctgcaaatagctccttagaggggctgcagatgaagaggggcttaggtcgggatgtcgtcatgtggcggctgcggggctgggaggcagctgtgggtgggctggagggagggagggtagaggcagatggggcctcccagatgcattgccaagtgtttagtacctggctgcttccaggttgccccctccagggtctcattgtcccaaaagggcttgtttatccctagcctacaacagtttttcctcctggaagtctttagccaggcttcttggagcttctctctctcggcacgtggggcaccttgctcagagcgatgctctgtgctatattagaacattccagcgccaagggaataaacagattgtgtttgacgacatgcaagtaatcccctccaaagtgctcccctcccacacacacatttgtcctgtgccacttgctgtagctccctttttgagattgagattgccttcaagtgggttgtggtgacagactggagggcttcagaggtgtcagatctctttccttgcatggtttattttattttggaggaacagccagaagtcacaaagtgccagttgggccagtatgaccgggatggtttttgcccaccaagaagtaccggatggcgatgacaccctcccattgcgtgctactcaaaacctgtcattcttggagagttgcgcagctcccttaactcaagtggtgctcagggcccttggccagggcttaacctgggtatgagggagagttgctacagggagcctcacccacagacgttcctctctgctgccctctttcatgctttctaacctggggactaatcccccagactttagattgccctgcatggttgtcaggcctgatgatgacctccgcgtctgacttacctgtgtccccagcatccagtgaagggcctgacctggacacaggtgctcagaaatgtgtaagaggcagctgcctaaagaagtgatcatattttcagctgggcgcggtggcttacacctgtaattccagcactttgggaggccaaggtgggcagatctcctgaggctaagagttcaagaccagcctggccaacatggcgaaactttgtctctactaaaaatacaaaaaatagccaggtagcacgcctgtagtcccagctactgtggaggctgaggcagttggaggctgagacaggagatcttggcagtaagccaagatcgtgccactgcactccagctctgtctcaaaaaagaaaaaaaaaaaggtgatcatattttccctagccagacaggatgagggaaaaaagtgatcatatagctacccttattaagcacctactatgtgccaagtaattacatagttacctcttttagcccccccagcaacctctcaaggtagatgattttgttcctgttttataaatggattaaactgaggctcagagaggtgaaaaaactcatccaagatctcacagccagtaaatggcaaggctcggacctgaccccagtgcctgcctctgcaacatcccctacccccagcactgtctcaggagcctctatcttccaaaacaagggctgtcaggggtgttgcagcaacaaagcccccagaagtcatagaactcttggtaggacagacatcaggatcatttgatacagtgactttcatcctgggaatcaggaagaactattagagcaggaaacaaagttttattgtgaatatgcatggtgaaatcacagcttcacacaaaccattaaaaaagccgacgtccatctaaggcagattggctgatagtttgcaagttttcctgcccatatctaacaccttttgttcacctgtttaggcttctgcaaacatttgccagaaactaaggcagcaagtgctgggggcagggaagagggcaggggcattaagaagaattgacaaggccgggcgcagtggctcacgcctgtaatcccagcactttgggaggccgaggtgggcggatcacaaggtcaggagtttgagaccagcctaacatggtgaaaccccgtctctactaaaaatacaaaacttagccaggcgtggtggtgcacacctttaatctcaactacgtgggacgctgaggcaggagaatcgcttgaaccaggaggttgcagtgagccgagatcgtgccattgcactctagcctgggcgacagagcaagactccgtctcaaaaaataataataataaaaaataaaaaaaagaattgacaagagacaaacttcaaactgagaaggttctacccactaagatgatgtgagttggaaaaatgaccatcttggccctggggtggcaggagagccttcccagctcccatatgccgcctcggttctctcctctctgcccccgctaccctgctcagggttccctcggtgtctctcttccctggaccacaagcaccagggaagctccacgagctccaggtttagtcatctctggtctccagatccagtgcatcaatgtgggtaataaataggtgtcaaacaatgagcacatagaaggagaggtgtacaccttggtccacccccaaccaagaagatttctgttattggagggacagaacagaacccatattaggagcttggtgattcaggtctggaaatgtgcaaaacgcttcagttcagatccttccgtggtattccaagctgaactagatcttcaagaaggtgttccagagacagattgctccaaactgggtctgtacagagaggggcctcctggcgcgtgcgttcccagagcaggttcggaggcggaagaggaacgtgagaccgagtgggctccattttgcacaccaggctggtttttatagttgcagagcttctgacttccaacactttgctgacggggaccccttaggtcaggatatttgctacgtaaaccttaacagaattgagaagacagattccctgcatggaagctatctgtacatgaagagaggggctaggaagagtcttccggctgggaatgagggcaggtgggctaacagaaaaagcaggccctttgcagcctcccaaacctggcttctagtgatccttgcttactcggtagccctgtgactgtggacaagtcattccctctctgaccctctgtgtccttgtctgtgaaatgagggtcacctagcagtggcaaggattgaatgagaaaagaggagaaggtgccatctcagacccagcacataataggtgctcaaccaaagtgaggttcttgcgaggtggggtggatgggtattttgcagcccataggaattgtaaaaatgtcagcgggaggcctctccccaggcccccggagctctggaaggcctgataccacacgctctcctcccccacccccagcctttccagggcccagtcaaccacttcccttccccgactacaccccccacctctgcctcctccacgactttggtgttctcatccccggctccagcctgtctgccgctgctggagcctgatgagactccaattcattatttatttcctcatgcggcgcctcctccacacgcttttaaagcagtgctgactgaacggggaaagtgactgaacagttcctgggcacttagggtacagcaggcagctggacagtgtcatcccggtccctgcagtgggccccattctacagatggggcaactgaggctcagagaggtaaactggctttcccagccagggccacagagctgggattggaccgcaggagtgtttactccaaagcccacaatctcgcctcccacggcggtgtgtatggtgcttctccattgcacgctatgggagagtaatggggaggggagtaatgatgcactgggaaggcgttcgtgctggtggaaaaacaggcatttagttcccgctccagtgcggctggaacacatccttctcatattataaggaattaagaaccataatgaaaatgtaagggaaacacacacgcaccccttttaaaggtagacaagctgacttcattctagtcacagtggaaggccaagaagctgacgggacccctgggaggaagttgctggtgggaacagaggggcattatcggatgacgtctgatgaatgccacttcctgcactgccctcagactcactggggcccaggtattgaattgtccttgtttttgtttctggagctgtggctgctgcccagagcagtggtgcatgcactggccgaggtggccctccctggctcagtgaccctgctccctcatccccgacggggaagatcccaccctaggttgtctctgagccttgaggcctggttgggagatacaagagcgtggcagtggcaagggaccaagccactctcagtcaatgccaccacagtcctagggggtgaggattagtcttcctttttttttttttctgagacggagtttcactcttgttgcccaggctggtgtgcagtggcacgatcttggctcactgcaacctccaccttctgagttcaagcaattctcctgcctcagcctcctgagtagctaggattacaggcacctgccaccacgctcagctaatttttgtatttttagtagagacagggtttcgccttgttggccaggctggtctcgaactccccacctcaggtgatccacccacctcggcctcccaaagtgctgggattacaggcgtgagccgccgcacccggccagtcttcccatttttaaaagccagaaaactgaggcactgggagctagggtggcacaagagcacatggatgagaggagtccaagccaattctgccagcctccaaagcccaggccctctatggcatcgctttccaggtgcagggtctccaggcacagcaacttagtggagaggggcacctgctgcctgccccgtccagggtctccccctccaggcccaccttttcatcagcactgccttccccacgcccccggctgacacccctgagcgagtcacctttgccgctgccttgggtgtggaaccctgtgcctttcctgagtagtcattcattccctcactctggaacccacccattggctcctcattctttctctcactcctttatttattcaacaaacacgtcttgtgcacctcccatgtggtcagttgtgtctgctatcttctctcccttgggcattcaggaaaatgagagttttcccaataggcttgaggtggtgagattcagggagctccctcactggccaaaggatggaacccacctctggcctaaggtgctttgccccacaaggatgttcttcatcacaaacacatcttggcaactgcctgagggaacaggacaccctgtctgggcctcagctacctgttctgttgaatgggttgctgtgtaacttcagagggcccttagagtgcgtgggcccccagcggccacaaagaatctgcctgcggtgctgggacactcttgcggtcctgttcctgtatgactcgtcttgccttctgctaaaagtgccagagagagaatggaagttgagacccaaaggcgtgctctggggaataagtaatattttactgatttttctggttaaagtgggtctcaggttgagacaatcccatttcttggccataaggttagagccttccagtgaactgaaagattaagatcaggtttcatttactgagcatctactaggtgctaggtgctccagatgtattttcagtagagccgcaggggttttctcgttttatttttatttttatgtatttattttggcaacagagtcttgctctgtgacctcgcctggagtgcagtggctgaatctcgactcactgcaacctccacttcccaggttcaagcaattctcatgcatcagcctcccgagtagctgggattacaggcacctgccaccatgcccagctaattttcgtattttcagtaaaaacagggtttcaccaagtgaccaggttggtcgcaatctcctgagttcacgtgatcctcctaccttggcctcccaaagtgcaggggttgcaggcatgagccactgcacccggctggctttcctgttttatagatgaagaaactgaggcccagaaaggctctcccacggctagaattagtaagtgatgccacgatgcagcctccaaaggctgggtgctctctgctgccatggcaggaaagccgggtggactccccagccctcacctcatgccaccctcaccatgtccagcagggaggtgcacacctcccagccccagctttgtcctggactcccctggagaggcccagctctcctcgctcctctgtgtgaacagcaacaggctgtgggaactaagtgtcacgactgcaatttgctttcttttcagtttcattcattagtgttcctcccaggccccatccccacagcccagggaaatgccaatcagcgtcttccctcctgccagcggcacccctgccctcccctccgtgagttcctgagatcccgccagcatctcctccagcttcagaatatctgctgttggatcccattgttcccacatcatcccaggaatcctaaatggcaaagcctgtcatcttgctgccgcccatgtagggcctgaattccaaggcagacacaccacctggcacagccttgtggctgcatctccccatgttccagaaggtatggtgaccttctaagacgagggacagccatgaccagccacttccctgagcgagttcaggtgtgagaacgccctggcactgggcatttctgaatctttccatatgtcagaatccaggaagtgccagtcctgggagcaccagaaccctctcctgtgactctacgtcacctcatgccagtcacctcctactgactgccagtgtgtcagggaggcctgaaggatgagagataaaataatgaaagcagggccgtggcaatgtgggcctggccactagagttctctcagcatttttttttttttaagtcacggggccaggcatggtggctcacacctgtaatcccaccactttggggaggccgaggcaggcagatcacttgaggtcaggggttcgagactatcctggccaacatggtaaaacccagtctttactaaaaatacaaaaattagctgggcatggtggtgggcacctgtaatcccagctacttgggaggctgaggcaggagaatcacttgaactcaggagtggaggttgcagtgagccgaggtcaccccattgcactccaatctgggcgacaagagtgagactcaatctcaaaaaaaaaaaaaaaagaaagacatgatcttgctctgtcacctaggctggagtgcagtggtgcaatcatagctcactgcaggcttgacctcctgggctcaaatgatcctcagcctcagcctccagagtagctgggactacagccaccacacctgtccaatttttttattttttgtagagatggggatctcactgttttgcccaggatgggctcaagctcctggactcaagcaacccttccatctcccgaagtgctgagatgacaggcatgagccactgtgcccagctgagttatctcagctttgaggaaacccccctggaatgtgtgaggatttcccctcccctcacctcctcaagtgaacagtgaccagccccttcaacagatgcggggtgatgggggcacgttgagcaaaatcagtagatactcataggtagtctgcctcagggttcccccttagccttcaggcttgcagtcactcaccctgtgactgagccagttgcatagcagtttccatgccccagggcctcagtttcccctcaggcgatgtgctttcctgtgtacctcaatacacacattgtctccctctggtctgggccagccccatgaaaggagagttgagactgggtgccaggtgtctgtgagtcataagcatttgggttccaaattgtgtgtagatgaatacagatgtgttttgtgtgtgtgtgtgtgtgtgtgtgtgtgtgtgtgtggttattttttattttttgcttcattgcacgtaagtcacattttcctatcttctgatccaagctctaaaagcgttttgtggtataaaatctcccatcatctgatccactctaccgaaataaaccagctcccctgccgtcatcttccctgaaaagtccccctgcgtcatgttctgaggccggcagggaggggccttgcccacttaaaacacttcaccataatccccccagcgcccccagtcctctccactccctggggggccgctccggtttcctgggctgttattactggaggaccagctgctaccctgccacccatccatacagacctggtctgtccatcctgggcctcacaggcccccgcttagctcatctcatggaaatatcatttaaaaaaataaacactggtttgattcgcacttccctctcgcctttgctatgtctcccagcctcccaccactgggcaccagttcatctattaaggtgttcttggctcccagagttccccacaggttgcaggtcagtagctggccgtccacctgtggtgcctctggggctgctaatgtcctctggggccacacaactgtttatttcttctgagtcctgtggtcatttaaatgccccttaaatgtggcatgggggaaagagtgagtgccacatgcactgtgtgacctcggacaagttacttccctctctgtaccccatgggtacctcagtgaagaggcatctccttcatgggctgtagggctcctgctgctccgaggcctatggctgctcctaggatgggaggtgttggttcttataaatgacataaagtagatgctcaagaggaaaatatgcttaaagttttcttgcaaggtctggaacagtggttcatgcctgtaatcctagcactttggggggctgagacaggtggatcacttgagtccaggagttcgagaccagcctgggcaacatagcgagacctcacctctacaaattaaaaattaaaaaaaattagccaggcatggtggcatcacctgtaatcctggctaccccggaggctgaggcaggagaatcacttgaacctgggagttggggtctgtggtgagctatgatcacccactacactgcagcctgggtgacagagtgagaccctgtccctacaaataagtttccttgcaaaccttctgtgaacttcatttgtcttccatcatccatgctttgattctctgaagtcatcagaaggcaatttgtaggccataacattttgagtaaaacataacgttagtttgattagtcccaaatggtgttctgacaactgcaaagctttgtgattcaatcaggtgggtgttttgtgcctgagaagcaacagggtgtcacattaagagcacagactccaaagttttgaacccctattcagccacttgctgtggcattggacgagggattcagggtctctgtgcctcagtttccttggctgtgaaatagtctaagaatagtacctactgcctagggttgagctggggattcactggggtggtaggcatggagcactgtaacccacctggcccagggaaggtgctgtgtaagtactgtgtattttgttgtggttagtatattatgatgtggcagacagttatgaagtacagacataacaggtgacattcattatcctcctgctaccgccattctcaaccaggggcaattttgacatctggggacatttggcaatgtttggagacattgtggttgtcacagcgtggcggggggggggatgattggcatctcctgggtagaggccagggatgctaaatccttctgcaaaggacagcccctgtggcaaaaaattctctggccccaaatgtcaatggtgccattagaaaccttgccctggccaggcacagtggctcatgcttgtaatcccagcactttgggaggccgaggcgggtggagcacgaggtcaggagatcaagaccatcctggctaacacggtgaaacacccccaccccgtctctactaaaaatacaaaaaattagccaggcgcggtggcaggcagctgtagtcccagctactcgggaggctgaggcaggagaatgccgtgaacccgggaggcggagcttgcagtgagctgagatcacgccactgcactccagcctggaagacagaaaaaaaagaaaaagaaaaagaaaccttgctctaatagaagctttctggtagcaccaaaggcctctctgtcctttgtagcacttgccttggctataattttgcatttattggtatgattatttgcttactacccatcaagtcccaggatgccatttcttggctgtgtgaccttgggcccctgggactgcctttcagaacctccatttccttcatctgcaaatgggattgtaaatatgtgataaattcagagttgaggttaagaccacaggctccagagttaagacgtacctgtgttcaagttgcatctctgctagtggtgaacttaggcaagtcacctgatgaacctcagtttcctccgctgtgaaatgggtctaataattcccttcctcattcagagggtgaatatgggaattaaaggagctcataatggtgaaaattattttattattattaaatccaccatccaacaactggttttctttgagccctaagtatgttccggacttggtgactatgtagtgggtattatgggcttaacgggcaatgtctgccttgcagagcccatcatctcatgatgtgggaggggtctggcctggttcatcctccagcactgacttctgacactcccaccccacccctgccctcttgcagatctgtgccatcattggcgggaccttcaccgtcgccggcatcctggactcatgcatcttcacagcctctgaggcctggaagaagatccagctgggcaagatgcattgacgccacacccagcctaatggccgaggaccctgggcatcgccagccttgcctccagtgccctgtctcctttggccctcaatctggtcccaaatctggctgtgtcccaaagggtgtgtgggaagtggggggaaagtagaggatggctcgatgttttgcagctacctcttttccccgtgtttctttttagacaaattacactgcctgaagttgcagttcccctttccctggggagccccaagaacagagtcaggcaaggggtggggagtccagggatcttggggacccctcctaggagagctgcagtctcttccctcaggggaacatcccagaatgcatatcgatcagctctcagccaggcttcgacaatctcgcagcccccactaggtggacacattaatgatttggtttctcccctgggcagccaacctgccccagaggcaccagacctgggctttcagctttgggaccaggctgcccaaaggtactcctttatacacccggcaccttccacgaaagatggtacttcccaagcaagcccctatgatttgtcactatagatggaaccctgacttctgccccatcccttcctgcccaacctagaacccaggcctcaagtctttaccccacccctttcttgttcttccaagaagcagatgcccagttgctcagcagcagcggtagagacttgaatctgcccaccagtcacaaggcgggtcacagattcctcttcctctcttctcctcgttcctctgaaccctccaccaatgtgcctcagcctgtgtgctgtgtggcaacagcattctggttcccactgccaagatctcccaccactctgctgggatctgcagtggcagggagtgggggttgtgtaaaggggaagtcatcttttgagatccagatagacatggtttgtgcacttacgtccagatgggaagcatccttcctgcaaccctaaaataatcatgcagcctctcagacggacgccatcggtcccaaggccttaggtggaggaagcaaagcaggccaggcctgtcctgtccgtggacctctaccttctggactccctacgggtgcagagcacttgggtttctctacagccatcgtggcccacttgacactgtgctcctccatcagctggtcacatgccaacacgttcccagcccctgaggcagctccagggtgccccacctgctcctgaggtgggtccctaccctgctgctcctcttcatcctttcccttttgtcctgaaagggaggagcaatggtccaggcattaattccacccagggaattttagctatgccctcatgtcccagggagagagccacacgcctgttttccatttatagcaagattgtttgcatacttttgtaatgaaggggagtgtccagtggaaggatttttaaaattatcttatggatagctcaagtctctgccatttgtaatttttggctctaagctccgattggagacgcttctccttgtgcatgtgagttgactgatgttgtgagtgtaaatgcatttggttatttctggtatcggtggccacttggatggatttttttacattctgttccccagttacaggaaggagtccctttggtgtgtgaatatgtgtgcctgtagagggtggggcagggtggggtggggatggaaatgtgtggcatgcacatgagttgaaattcttttatgcatttttttgaagaaaaaaaaaaaaaaacaactctgaggacataggggatgtcagtttcctatggaagagacacctctgacccgttattcttataatcaaaatctgaagggaaaaaaatgttttagttctttccccactcgttgggttcaactagattaaaaggctgattttcagaaatattatggtgtgattctttctaccttgactggggctgggtgacccaaaggctggaatcacagccagaatggaattcacttctagaggagagaaggtagaagagttgaaaaggagatctgtgaggatgatcagaaagtcaaaccccggccaggcacggtggctcacgcctgtaatcccagcactttgggaggccgaggtgggccaatcaggaggtcaggagatcgagaccatcctggctaacatggagaaaccccgtctctactaaaaatacaaaaaatgagccaggtgtggtggcgggcgcctgtagtcccagctactccagaggctgaggcaggagaatggcatgaacccagaaggcagagcttgcagtgagccgagatcgtgccactgcactccagcctgggcgacagagcgagactccatctcaaaaaaaaaaaaaagtgaaaccccctttggccaggtgcagtggctcacacctgtattcccaacacttttgggaggcagaggcgggtggatcacctgaggtcaggagttcaaaaccagcctggccaacatggtgaaaccccatctctactaaaaatacaaaaaatagctgggcgtggtggcaggcacctgtaatcccagctactcaggaggctaaggcaaggagaatcgcttgaacctggaaggcagaggtttcagtgagctgagatcgcaccattgcactccagcctgggggacaaagcgagactccgtctcaaaaaaaaaaaaaagaaaagaagaaagaaagtcaagcccccttagattaagtcattcctttattgagtccctacagaatgttcttgggtctgtcaccttctagctgtgcagcttcagtccaggtccttaacctctcagtgcctcagatttgttgggtgaaaatgaggatagtaataaaactaccacatagggctgtttcagaaatagaatctataacgtgcacagaaattatattagaatgagattgtctatgtagaagagtgtttattgctggtacacagtaagttttcacaaatggtgattggaccattatgagcattcccaaataggatataatcttgagaaaagactaactttagagctttgagctaagggctccataaatgaaaggtgattcataaattcttcttgatttcaaaggacctggcactcctttttcaaccctaagctcagcaatgagagatcatcatcagctatgagcaatggacttccatggatctttcccatcttgctgccaagtcctacaagactttcatcagaacagccctaacacggataaacacaccagggatgaatgtgggagggaatcagtctgtgagaaattcttaactctccccatgctctcgctcttacatcctgatacttgagttatgtgtgttcccaaacgtgtttataccagttgtgcttttatactggtaggatgtgatttggggaactattagttaaaccaatgagctacaagaaatgaacctagtaaaactaagttgaatgctttagagagacttgattaaggtgagttgttacccctcccaactcaaaatgctgctgaatgagaagtgaacaagacaactgtaaaagatttgggaggccggacgcgatggttcacgcctataatcccagcaccgggaggctgaggtgagaggattgcttgagcccaagagtttgagaccagtctgggcaacatgatgaaaccccgtctctatagaaaaaatacaaaaattagtgggcgtggtggcctgtagtcccagccacctgggaggctgcggtgggggcaggggcggcgggggggaagtggggggagtggtggaggctgcagtgaaccaagatctagccgctgcactccagcctgggtgacagagtgaaactctgtctcaaaaaagagagaaagagagagggagggagggagagaggaagagggaaggtgggtgtggagagggagagagacagagaacggaacaactgaagatttttggttggtttatgtaaggaaaatggaggggaacaccgatacaggtttctctgtaaggtagagccttagcccagggtcattgtcgaatgtgttttacgttggcatacaacatttaagggatggatgccatttttattatttctcctttcaatgaacttttccaattgtctaaccagatgtggattacagtggtttcatataagaggatttctaaatcaggattacagagcaaaaccctccaggggtgcgtgacaggttgggagctgtggtgggtccaggcagaaatggcttccctgggaagttgcggaagaggcgtctctggagacgtgcttcgtgaggagagaagctgaagtgttgcaaacaacactggttggggtgggtgaaacctgggaagagggggtgaaacctgggaagaaatggggtgtggcactagagttcataaatagtagctgtggttagtttttttttttttttttttttttgagacggagtcattgcccaggctggagtgcaatggcgcgatatcggctcactgcaacatctacctcccagattcaagcagttctcctgtttcagcctcctgagtagctgagattacaggcgcccaccaccatgcccagctaatttttgtatttttaggagaaacagggtttcaccatattggtcaggctggtctcgaactcctgacctcaggtgatccacctgcctcagcctcccaaagtgctgggattacaggcgtgagccactgcgcccagcctgtggttagtttttattactatatgttacaaataatttttaaattcttgccggaaacaatgtgggaggccactggaggtctcaatcccttcttaagaaactggtcctttattccagaaggttcattagctgctgcggcagttagatgcagtggtccaggaacgtgagtggggatgtgtgtggacaagaatactcactggagacccttttttcttgccctagcagttgtttcctgtcagttatggagtgatgaggtcacgcacttcattctggccagtcattaatatgatttggcattctctgcatgccaggcaagagtgactgctcttcaggccagatcttccttcgagatggatgttatctcctttttaggaaggaggaaacagagagacctcgtaacttggcatggccacacagtgagtcacacagttagtaaagatggaattcatacccaggtctgcctgactctgggattacgaagaattacatggttccacctcagtcccaaggtcatctttgctgtgccaaaagggaaaactggaaataggggtggtcagagcaggaggtgctttttttggttttgtttttcctttaaaacaacctgcagagaaaatctaaattaaacattcgcagggacagcgttcttacaattttttaaatcttcaaaatgtaattttaattacacaaataacacaggctcataagcccactggaggaaaattatcaaatactaaaaaaagtaaaaggggaaaaacgaaagtcacccgtaatcccactaatcagagatgatcatttaatgataacattttagtgatgccttttgataagcaaaatgggatcatactgttcatattattgtatagcttagccctcacttaacagacatcttcctagattaataaatacggatcgcattattatctttatgggctgcaagataaataataaccatattgagcatctaatggtagattatgtccatcctttgttcccatctcactcagagcctcagttttctcacctgtaaaagggacaattcatactgttatttaacggactgaaatgaggtaatgcttgtaaacctgttagcacaatgcctgacagtaaatgctcagcccattaagaagagccattattatccatctaataaataaataaattccaacatttattaagttcttcctctgtgccaggtattgtgctaagggttcatttaatcctgacaccaggccgggtgtggtggctcacatctgtaatcccagcactttgggaggctgaggcaggtggattgcttgaggtcatgagttcaagaccagcctaaccaacatggtgaaaccctgtctctactaaaaatacaaaaattagccaggcgtggtggcatacgcctgtagtcccagctactcaggaggctgaggcaggagaatcacttgaacccgggaggtggaggttgcagtgagccaaaactgcaccactgcactccagcctgggcgacagagcgagactctatctcgaaaaaaaaaaaaaatcctgacaccaaaccaatgaggtaagtactatcattattcccatttttcagatgggaataaactgagtgaccaagaggctgaatatcttctccaaagccaaagaaccaggcagtggcagagatccaaacccaagcgatttgggtgccagggctcaagcacttccccatgcagccactgcctcgagaaataaaaagactcaccagacacttcctctgtgctaggtgctttgagttcctgcgcatgtttccaggggtgggcatgagacaagacagccagtctcactacattgttagaatgacagcctccagctcttgtcatccaggatatcattgtgcctgttttaattttactgaaccacacagcatgttaaaaacaaaacaaaacaaagcaaaaagccttccctgctctgcttgatcatggatactccttgatgatcttgggttctcaagatctgtctttacatggctttccttcaccagtgaggctctgaacttcttgggagcactcctccccagatctctttaatcaagacctgtacctggctccatgtaggtaccaaataaattgatgagcaaatgaatgaatgtatgagtaaataagtgggtgaatgacaataaatggatatgtgatagagaaatgagtgaataaacagaaccagtgagtgagtgagtgaatgaatgagtgaatgaatgaatgaactccttggggcagggcatgggtttgactaacacctaaggactattctaagaagaacctctgacctttactgtgtgtgcgccgttatgccagcgtctgctcctgggttgccgataggtaatgacttcctttcttaggactgccccccaacctccttattcttggagcctgggcacacgcacagctgggtggcccttcagctgatactgccttaactgctttaactctgcctgctgtgctgtccaggcttctgcaaatagcccaggtgtggccatcctccagaggcctccaacattaactgtgaagggcccggaataaaacctagtattagtaggccaggcgcagtggctcacgcctgtaatcccagtactttgggaggccgaggcgggagaatcacctgaggtcgggagttcaagaccagcctgaccaacatggagaaaccccgtctctactaaaaatacaaaattagccgggcgtggtggcgcatacctgtaatcccagatactggggaggctgaggcaggagaatcgcttgaacttgggaggcggaggttgcggtgagccgagatggtgccactgcactgcagcccagggaacaagagcgaaactctatctcaaaaaaaaaaaaaaaaaaaatctagtattagtaaacgcaggtgtttaacaatgtcaccactacatgtcagggaacactgataaactaagagagagcacgggacctgcctgggtgtggctgctgtacttgcaagacatcttccctctctgagtttcagcatgccggcatttggcactaagttgtcgttcaacatatatggaatgaatgaacgaaagggagagttggagttaataacaccttgcatagaataaaccccgtcggttcttaacccgaagagagtcgagacccagagcccttttccttccctgccgccacggtgcccacggagggggcgtggttgatctccctcacagctccgtcgggaccagagacccggggaccttttacacccagggtcnnnnnnnnnnnnnnnnnnnnnnnnnnnnnnnnnnnnnnnnnnnnnnnnnnnnnnnnnnnnnnnnnnnnnnnnnnnnnnnnnnnnnnnnnnnnnnnnnnnnnnnnnnnnnnnnnnnnnnnnnnnnnnnnnnnnnnnnnnnnnnnnnnnnnnnnnnnnnnnnnnnnngggccggcggccccacaaaccccgcaggcacgccgccggccgccgtttagtccccagagatagaaaaaagtagaggtaggagggcgcggcggctcacgcctgtaatcccagcactttggaaggccgaggcgggcggatcacgaggtcaggaaatcgagaccatcctggctaacagggtgaaaccccgtctctactaaaaatacaaaaaattagccgggcgtggtggggggcgcctgtagtcccagctactcgggaggctgaggcaggagaatggcgtgaacccgggaggcggagcttgcagtgagccgagctcgcgccactgcactccagtctgggcgacagagcgagactccgtctcaaaaaaaaaaaaaagaacaccagtaagcctctaccgcaggccctacacaagcaggcccttgtactcactggcatcgccctcccggggccgccaggaatgaggcactgagatcccaccccaagccgctgggggcgccattcgacttcgctcctacggaaatggggcttcgatgtctttctgcgcttgcgcggcacggaaactcacttccggccctgcgcactcagggtctgaggcagctagtagccgggtgagtggaggctggagttttctcggacagtgaactctaccgccccgtgagaccctgccctatgtgtcgcgggaacacatgtcaccccacagctctctttgagtgacctcccgaccacccattcctgcctaaccctagcattccttcctcagcctcaaggtcccagtgctaccctctcccccacgacccctttagacgggcatgcgacctccacacacgcctcactttatgtgatagtcagactagtcgcatctctctgtcctccctcagttgccttttcagaggctacctcccctgtagagcctttgttgggggatgaggagtgtcttgggtcgagaacaggcccctgtaacccactgagcgccccttcattccgtctctctccgccctttgtagagggtcaccatgaagttcaatcccttcgttacctcggaccgcagtaaaaaccgcaaacgtcacttcaatgccccctcacacgtgcgcaggaagatcatgtcatccccgctctccaaggagctgcggcagaagtacaatgtccgctccatgcccatccgcaaggacgacgaggtccaggtacgtctccctccggcgctagtggcgctcggacaccgttgcctaagaacgtcatgcgtggagcagtcacagactcacatgcctcaggactctggaaagtagtgtgacccttcagatgtgttaggccagagatagggttcagagccaccagagagtgcctgcgttgctttagagcatttaattatttaatagtaatagtaaaatttaataaaacagtatgtcaaccaagcaaaaacctgcttttttgtttgttttgtagagatagggtcttgctatgttgcccaggctggtctctgaactcctggcctcaagtgatcctcccacctcagcctcccaaagcactgggattacaagtgtgagccaccgtgccccgccaaaaatacttttgatttaaccttctggctgctagtttgccaagtgttgttgcccagggtggcttgttgaaccagactgtaggggaaggtgctgcagtgagagtagtgttttagtatatttgggtgtagtgggattgatggacagagatttgtgggagctggccatgtgatagcattggatttggcaggagaactggtaaagatgcagcgagtcactctttcataatttctaaaagactggcccatgtgagaacgtacaagccctctgttctctgtgattggagcttagaatgcatgagaggagggaagggagttggatatgagtgaaataagcaggggctagattcattcctcaaaggaatatttatggagcacttaccagagattgttctaggacaagattgacgaggcccttgttctcatggagatcacgttttagagcagggtttcctagcctcagctctattgatatgttggactggataattgttgtggggggtggggggtgggggctgtcctgtgcattgtagaatgtttagcagcgtccctggcctctccccactagatgccagtggcactccctcccttcacagttgtgacaagcaaaaatatttccagatattgccaaatgctccctggggggcaaaatcaactcttccctcactcagttaagagctattgtcttagagaatgaaatgacataaggtgatgaggcttggtgtatcatctgagacactgggactctttgaaggtttggggatatgttaaggaggaaaaaatgtggagttaagccggaagtgtgacaggaagagtggaaagagtagttcagaggtatgatcagcagtttcaaccccctctctcctggatccttcccatcagacatgttctagaatgggggaattgcaaatacttataggggataggtagggatagaaaatggcaaactggaaagctcaagcctcacatataagatataatcatctacctttagcccattgatgcctgggggaaatgcaggcccattgttagattcttggattttcaaagagagctggaaaatttggattcacttccctagcccacatttccttccagctactacactttgttctctattcataaccaacctcctcaagagagctgtctacacttcctcatctcccattcactcttggattctcttcagtctattccctgtccccactacattatagaacctactttgacgtagatcactaataatcccttcgtgactgaatccagtggacacatctagcatctctttctgctctgtgttctctacgtaggtaaagaataggtaataatccgttcttagagctttaaatgtctgctgtgtgctaacaactccctcttttatatcccagtccagaccactttagacaacctgtatatctgactacctataacacagacctatagatctgactacctactgaacatctctatttaggtagcccattgacatttcaagcttcttaagagtactcttgatcctaacactctcactgcctccagaatccaactctactcccatcttccacatctccagtaagtgccatttatatctccccagctgcatatgcccctaaacctttgttatctttaacaacgctccttaaccccctcttgtaatctaccatcaaggcttgttgattctacctccaaagtaagtcttgaacctatttcctgtccagttcaaggcagcattgcagttccctcttttacctttgtccattttccacagagtggtattatttgcaaatcaggtcctatttaaaacctttggcaggctgggcatgatggctcacgcctgtaatcctagcagtttgggaggcccaggcgggtggatcccctgagctcaggagtttgagaccagcctgggaaacatggtgaaactccatctctactaaaaatacaaaaaattagccaggcgtggtggtgcacacctgtaatcccagctactcgggaggctgaagcatgacaatcgcttgaacccgggaggcggaggttgcaatgaaccgagattgtgccattgcactccagcctgggtgacagagtgagactctgtctcaaaaacaacaacaacaacaacaaaaaacggccaggcacagtggctcacgcctgtaatcccagcactttgggaggctgtggcaggcagatcatgaggtcaggagattgagaccatcctggctaacacggtgaaacccatctctactaaaaatataaaaaattagctgagcgtggtggtgggcgcctgtagtcccaactacttgggaggctgaggcagg

SEQ ID NO: 160 - DNA, 1835 bp, Homo sapiens
gcctgcccgcgggcccctttaaccgggtggcggaaggggcggccgggcgggcggcgcccaatgggctgcgcggagcgtcacttcccggcagcgggaggcgagtggcgagtggcgagtggcgagtgtcaggggggcggccggcgggggcggggcggccggaggaggcgttggcagcgggctcggacccacgcggcgccgcggcccgcctggcctgcagcgctcccacccccggcggcggcacgatgccctttgacttcaggaggtttgacatctacaggaaggtgcccaaggaccttacgcagccaacgtacaccggggccattatctccatctgctgctgcctcttcatcctcttcctcttcctctcggagctcaccggatttataacgacagaagttgtgaacgagctctatgtcgatgacccagacaaggacagcggtggcaagatcgacgtcagtctgaacatcagtttacccaatctgcactgcgagttggttgggcttgacattcaggatgagatgggcaggcacgaagtgggccacatcgacaactccatgaagatcccgctgaacaatggggcaggctgccgcttcgaggggcagttcagcatcaacaaggtccccggcaacttccacgtgtccacacacagtgccacagcccagccacagaacccagacatgacgcatgtcatccacaagctctcctttggggacacgctacaggtccagaacatccacggagctttcaatgctctcgggggagcagacagactcacctccaaccccctggcctcccacgactacatcctgaagattgtgcccacggtttatgaggacaagagtggcaagcagcggtactcctaccagtacacggtggccaacaaggaatacgtcgcctacagccacacgggccgcatcatccctgcaatctggttccgctacgacctcagccccatcacggtcaagtacacagagagacggcagccgctgtacagattcatcaccacgatctgtgccatcattggcgggaccttcaccgtcgccggcatcctggactcatgcatcttcacagcctctgaggcctggaagaagatccagctggtcacatgccaacacgttcccagcccctgaggcagctccagggtgccccacctgctcctgaggtgggtccctaccctgctgctcctcttcatcctttcccttttgtcctgaaagggaggagcaatggtccaggcattaattccacccagggaattttagctatgccctcatgtcccagggagagagccacacgcctgttttccatttatagcaagattgtttgcatacttttgtaatgaaggggagtgtccagtggaaggatttttaaaattatcttatggatagctcaagtctctgccatttgtaatttttggctctaagctccgattggagacgcttctccttgtgcatgtgagttgactgatgttgtgagtgtaaatgcatttggttatttctggtatcggtggccacttggatggatttttttacattctgttccccagttacaggaaggagtccctttggtgtgtgaatatgtgtgcctgtagagggtggggcagggtggggtggggatggaaatgtgtggcatgcacatgagttgaaattcttttatgcatttttttgaagaaaaaaaaaaaaaaacaactctgaggacataggggatgtcagtttcctatggaagagacacctctgacccgttattcttataatcaaaatctgaagggaaaaaaatgttttagttctttccccactcgttgggttcaactagattaaaaggctgattttcagaaatat

SEQ ID NO: 161 - protein, 295 aa, Homo sapiens
MPFDFRRFDIYRKVPKDLTQPTYTGAIISICCCLFILFLFLSELTGFITTEVVNELYVDDPDKDSGGKIDVSLNISLPNLHCELVGLDIQDEMGRHEVGHIDNSMKIPLNNGAGCRFEGQFSINKVPGNFHVSTHSATAQPQNPDMTHVIHKLSFGDTLQVQNIHGAFNALGGADRLTSNPLASHDYILKIVPTVYEDKSGKQRYSYQYTVANKEYVAYSHTGRIIPAIWFRYDLSPITVKYTERRQPLYRFITTICAIIGGTFTVAGILDSCIFTASEAWKKIQLVTCQHVPSP

SEQ ID NO: 162 - DNA, 26804 bp, Mus musculus
gttgcttggttagtccctctggggtttccccctcctgataactttgtgcctcctggagttcagtctctgtgttctttctttttcatttgctcatttatgttccctggctggtacagcaggctggccttgaacttgcagggtccctcttacccctgtctcccgagatctggaatttcaggcctgtgcattcacacccagccatggactttattacagttttgtatttagctcgaatgaagcccaggctggccttgaacccgatgtcgagcctaggacagccttgaactcttggttctccagagtgccgagatcacaggactgcagcaccacaccaagctcatggtttacttcagctggggctgtggtgggtctccactggggatccgggaggctcttaccagctcctatccctggctcaggccgtcttctggactgagcagtgcaggatgtggggctgggctggcaaggctcctgcctgagtcacggggcgtgaggcagcctgagtcaggccgggagggaagtccctgcggaaggggctttcacagtgtgatggaatctcggggaaagagaaagtgtgttccatgtccctttgacacactgaccttgtgtgagcctgagccatgggcacccagcctccagctccagatgccccaggcactgggaggatcagttaccctagcctccctaggacacagccagggccccagcatacacctgtccacagagtggcagtattagaatgacccttggcagtcttccaagccaccttacaggtcctttgtgtcaggtgtgcccaggtgctagggcaggcagtgaaagttcctcaccctgctgcccccaggttgtccccaaatgaacttttcccttagatggcggaaattctgaacacctaatctgtgccaggttttcaggacctgagctaagacagtgaacaaggtatgtttacacttgccttgccaagcgcagatgtcctggctcacaggggtttccacacttagaaggcagaggcaggcaggtatctgtgagttcaaggccagcccagtcttgaactagtgagaccctgcctcaaacaacaaaaggagagggcattctgggctcagggatcgcaccagcaagccataaatacagagaattatctaggccagccactgtgctgcagaggttcaggctcacccaaggaatgttgaatgttcttttttagttgactttgttttttttttaaagacttgctcattttatgtgtgtgagtattttatgtttgtgggtttgttttggaaacagggtctcacggtgtagccctggctggtccagaactcactatgtagaccagattaaccttgtaaagaccaagtgggttgggattaaagcttgggactgcctattgcttttagatttttttgccacaatcctcctgcctcagtttcctaagtgctaggattgtgtgtgtgtgtgtgtgtgtgtgtgtgtgagagagagagagagagagagagagacagacagacagacagacagagacagagacagagacagagagagagacagagagagaccacatctaaacattctagaagccacaacaaaatgtaaaaaaaaaaaaaaaaaaaacaacaacaacaaaaaaaaaaaacctgaaatcacctcacagagcaggaggcagataccctagctggtgaacctgcatggcaggaagagagacctgcacctgaatccatcgtcctggaggctacacatccagcagctccctcctcaagtacaataaagggtcacatgttgggggaggggctggccctatgtgctggccagggcagtggggacagcatcacaggaggactggcatccctagagccctcagctttgacctgatccttgctgggcccattcccttctctaaatgatgtgtgtgtcgggggggtgtcccaaaacaacacggtcccccaggagatttatcccacctccccagctgcctgagacacccacaccaaggacggcctaagatgccccaacctccacccccaccatggcccctggacctctcacccgtcctttgtgagatgcactaactcttgggtctcagcctgactgtatgactgctgagatcttaggaagggaggtacatttccaggggaggccacccttttcagacggaccttgtgtgagccgggacatcaggtgggcaacctcaatccatctctgtgggaacatgtcctttttctgctctgtcttccggcagcagatcctctggaagaggagcccatctgagcagtaggctggaggggcaggctcctgccaaacaagagagaccattgttggtagggggctttgagtcttttttacatcagttctaccaacccaggaattctctgatggtcagcacctagcccctccttgggggcccctgagctcgctcagggctgaggctgctgccagactagaggtgggggatgggaacacgccccaaaggacaaggacaaaggcagcagaggggcatgagcttcagtggcagagcgcacatgctcctcacccaggcctgggaactggcagggcaccctggatggtgacccagaaacctggctgtcagcggctcccgcctagcactgcccccaagaactggaatggctggccagtgtcagcatgactatctcgggattctctgttcaccccaccagatgatttagggctgtagaggatccccagtgcgagttaacccacgcctagagcccactgcctgctcccaggagattttatcttggcgagccactgatgtgtggtgctgtggttaggtccctagaaaggagaatgcaaagaggctgcctgagccagtctcaagggagactgggtcctggaagtcacagtgagccctgcagtggggacaggcctggcaagcacaggatggatgaagaccaggaagatgggaaagcagggctctctgctgcccgctccaggctagattccaggccaacttcacagctccagcccccacccccatctcctaccaggagctagctcccctcccttatgcccacccccagctacctacctcctccagccctcaggaggccttcagcccacccatccattcaccagacttacactcacagttaggccttgggcctggtgtccagcttgctggggttgaagatgaagaaaaccaagcctaggagattaataaatcccctggagtgtgctcactgccccgccccgcaagacctgctggtccctccacaaccaccgtgctcactccctaacacttgcctcttgtttgactacacaacgtttttgtgcttctacaacctgattggtagacaccctacacacacacacatatccaggccacatatccccaaacagagaccaggactgttttctcaaccctgagaaaggtttcaaggtggcctggggtccccagtctaggaaatacacgggctctgaattcaataggtggctggtacctctacaagctcctttgggccaaaggaaaagtatttgatcttcaaagatctcactcagtcaggcatggtgatacactactttcttcttcttcttcatcttcctcttcctcttcttcctcctcctcctcctcctcctccttcttcttttttttttttttttctgagacagggtttctctgggtagccctggctgtcctggaactcactctgtagaccaggctgacctcgaactcagaaatccgcctgcctctgcctcccaagtgctgggattaaaggcatgtgccaccacccggcggcagtcagtgctcttaaccactgagccatctctccagccccaagtgatatacctcttaaattccaacactggggggggggggtgcagagacaggtgggtctctaagttcaaggccagcctgacacagagaaaccctgtcttggaaacaaaaaaacagatgctgctgctgctgctgctgctgctgctgctgctgctgctgctgctgctgctgcaaacaacaatacaacacctcagacttccccagctcagttctccttggcagctagagacattctctctctaatgcccattgagcaacgatgtcagtccctctgataaaaggctatggaactgtcaggtgaagacaggagatgacaccttctcatggtgacaaaggacaggtgggctcctcctgagggtgcaggagccctgtcatgtctcaggctagaccatcctaggacagttagtcttctgccttcagtttgccttgagggttagggataggtgtcctggtactaaataccaatggatagcagacactgaacactgcgcttggtcttgggcagactgcacaaatgatagggcatacagtccttgtcttgtctctccagacaagaagagcattcggaccattcactgacaacagttaaatagacagggagggaacaggcaggcaggtttttgttgttgttattactgctgctgctttttaaaataggatacactatgtattactgactgacctgaacttaccatgtagaccaggctggccttcaaccggttgagatctgcctgtgtctgcctccggagtgctggacagaaggtatgcatcaccactgccagacttcacgccctgaggctcctaagccagaagaggtcttgcctttcaggtaggaagagattcagaacgggtgcttacagaactgctgggaaactggaggagcaggctggacctcctagaacaggcctgagctgctggcctctgccccagtgaaggcagggacaggaagcctgcctgtcaccatacctgtattctgaccccataaacactggcaactgggcgttcctcagcgctcctggtgggagcgctggagagccgcttccccttttgtctgttactgaaacctagcatttgaagcagtagcttcagaggtgttggggtgggggtggggaatgggactgaatgccaccttgcttgcctctctactcccaagcctagcctattcctatgctggacagacgtccaacctgtctggtctcaacctgcctgcttccccgacccaggccctgggtccctgtttgtgcttccacagcacagactaagtccatcggcgatgttgcccgggtcctttctgtcccccatccttcccttcaacataagtgccttgagtatacaaggggagctactctggtccagctggtgccgatcccggtgccgggagagaaatctcttaggctgaaaggggcaaaagcctaagcgttttgtttgcttttgagaatctctggctggccttgaacgcagagagatctgcctgcttctgcctcctctgtactgggttttaaagcctgccgccccccatctcctcaacccacccccccatgcctggcccaagcttccttttttcattgccttgggattggggtgggaatagtgttccctgatgggggagacagagagtaaagagaaagaccctcgtggctctgttcttgttcaataatccctcttcctcagtgtttcctgaggttagatagagctgggtttgctggggattgatagtcccaatctctttctctccttctgtgtgtgtgtgtgtgtgtgtgtgtgtgtgtgtgtgtgtgtgtgtgtgtgtgttcgagtcctggatctcacagcagggagaaaggcaggcagagagctgctcccccctcttgttctctcgaaacatcttggttttccctcgaaagttggaaccagaagaggccctccttcccctccagccggccaggcttcctggcaacagagtttgtggtcagcagggttctgaggtctgatcctgccagaggaccagatgcactggtagctgggtgactccaggagagtgggcaagcacctcgtgtcagagtggccccaatagtggctggcaaggatcagacctggttgatatggcctagggccagcactgtgagccaacctaacactggctggtgtgggtcagtcagtgttcgctggtttgggctaggtcaggttgatgcctgctgtgagctcatagccgtgatgagtggccctgtcactccgtagcgtcctgcacgtctgctgaaacccggcacgcaccaactgtggtccagcagttcctctcctaggcacgcacccgatagaaatgtgcagatctgctcactgggagccctgccacagccatggtagcactcgctgtaccagccagaaccagcaactatccagaaacccttccacagaccagggtaaacaaactgcgggacattcacatttgggaagcctggggccttgtgggtgaactctgcagccacgtgctgtggcgtggtgtccgcctggccaaaggcctaggaaggaagtgagtccgtgtgcccacactgtaaaagccactgtcaccaacatgcttgggcacaaacaggtaagactttggctctgtcagggaggaagtagacctgctccttggtcttggcacaataaataaaataaaacatgtaatttcttatttttagaaggtctttttttttttttttaaatccaatattacagtggaaagtacttgcagtatagtgcaatctggctgcgaaacttgtggcaatccttatgtctcagtgcacacacaattgtcaacaatgggtaacttacacttttatctctcttacatgtatgtgatgggggcaggcacatgtaaacctgtcaagtcaacctctggttgcttctccttctccaccatctgagattccaggatgaaactcgggcgatcaggcttagccacaagcaccttcactgagctggaccatcgctagagctttttttggtttgtttcaggcagggtctcactaggctgtcctggaactcagtatgtagaccgggggtgggggggtgggctcaaactcacagagatcctcctggaggctgaaggtaaaagtgtgcccccataactccctttattttttgggacagggtctgttacatggccttggcagcatcctaccaccatgctcccccaacactccccttttaagacagggtctctctacacagtcctagctgtcctggaactcataaagcctgtgtccctctgctgccacacctgtccctcagtcctttgtttattgcagtttgagtcccaaaacgagtcccaaaactaggtagggtcttctgttccaggtgacctcttttcagtgtcctggtttggttaccgagtcagatacaccccatccttacgtggaaattagagacacagaacaccagacagtcccttgctgtacccttcagggaacaacaggtctcaaactagggggaactctccctaccaatccttccaagctttaacgggtgagctattcttaacaaagtctaacctgctagcctgggacgcaggtcattggatccctgacattccagttgggatctctgaaggtcagtgcttaccggagaagggcatggaagacaacttagatacaggcccagaactcaccccccacttgcctcctgtaccggacccatccactctccagttgcaaggaagtcctgttcaggccactaaccagtgcttcctgcatctcctactaggtctttaggttcctgccctaagtctaagcttaaaagcacacaggactttgtgttactcactgtgccctaagaacttggaagtcaaaaacgggttttcaacatcaccgctgcctcttgtctggtcttctttcattacagtcaggaggttcgatagaactccttaccgtccccccaccccccatcactcttaagcttaaatatcattgcagaaggagaggaatgggatacagggtgcgcaagccgaagagcacggaggtatctgcatgggggtcagtgggcggaactgtttgtttctggagtgggcaaggcaggagggagacaaactattgtgtttgcctacttctagagagggtcttgggtcgattacaaaaacacaagacacaaaaccggccggtgagcatatcaggacgaaaagaagcagaaaaatacgatcaagccagtttactagaagtgggccaagcaattggcgaagctttccgaaagcccatccaggaaggaagggtatccttttctggtacacacaggtcagaggcagtgtccgcccaggggccactactacgtcggaggaaaagggcccgcggggccattcccaaactctcccccttcaacaccacagcaagggcctagtggcctaggctgctggcaatgacctgtaccatgggaggatgtgggctggcgttggtgggagttggcagcttgctcagccacacctcgctacgaaggtccccagagctcgcagcaacttcgagcccctccagccaactcggctcgcggggcacaaagatggagggcgcggcgcgcttccatcccgccccgcccccacggcggttgcacacaaaggggcagccgctcctcccccagactgccccggcgccctaggctcccctccacccgttgggaacgcccctccatgacttcctccttctccaggggcacccctggaactgagggtcacctggaccttggtccgggacccgcggcctgccgtggcctcccgcgcctgaccgctgcgccccacccccaccgagcacgtgctgccctgcgcccagggcgccatcctacggcccgggggtggggggtgggtgggtagccgggcccgccgcgctcgccaccccccaccggaaacattcctgaggcattcctgaaagggaggcccgctccccaaggctcccaccccgcctccagccgggcgcacgctgggcccccgcgtacccttccaccgcccgcgcgccccccgaggagagggctgaccgcggaggaaggggaacagagttatgagtcacagtcgtgtgtcactgggcccgaattacgattccctgcatcacgagaggtgtggaaaggccgactcggggaaccgaggtggggaggtgcgtccaagggcccgcgcccggcctgcagggcgcgccccaccgcccgccatcttcccacttaggcttcctccggcccagcaacaagtcttttgttgacccaggcgcccagaggcgggaaactcgaacccctgccctcaaggggcttccaggcgccccttgtcttaagtcgtaagtcacgggggcggggaatcacaccagagggacctcgtgcttcctcaacaccaagcagctggccacccgtggctcctccccgcgatgtcccggcgaggcggccaatcgctcggctcctttgaagcctgcacctgggtggcggccgttactagatttaaaccgttggcgttggccaagtttcacgtttgggtttcacaagactttgttttttacgcgcctggaggcctccggagacgcacacgccgtcacctgcttggtggcagaggggaattaaggagaggccctcgacatgggctggggggggggcggcgtccgggccgcgagaagctccttagggtacgcgtggacgtccgagggcacaggcgtcagcgcgcgcctccccgcgaggccggagtccacgggggggctcctgtaggtgtgtccccgggtccccacttaaacagcagggccgccgtcaccggttcctccaacgccaggctgctcgggaactgtgagaaacgagggccgtcggcgcgcgtgcccgcggaaaccgcgcgcacagtggcgagctacccgcgcgcggcggcggcagctggcgggcggccgcccttttaaatccccgggctcatttgcatggccccgccccccggtgacacggctggcgcgggcgggcccgtcccccctgcccctgggtcgctctttttaagctcccctgagccggggctgcgctcctctaattgggactccgagtcggggctatttctggtgttggcgcggctccaagaaggcgtgagttcgccgccgctcgggtggcttctttttttcctgtaggtctagaatctaatcacattattatttattgaggccgcgcacgggccgtgcccagcttcctgcccctcgccatcctccaggggagcgggatccgtcagtgttccctcgccccagctcggatgtgacacacatccccggcgggggcccgggcggcgcgcacgcagcggtctcagcgcctctgccctctcccggtttcagatccgcatttgcgaccggcggcggtggcggcagagcccaggccggtgccctgagcccagccacgccgcacccggcagccccgagcgcgccccgccggcggcctgcggagctcgcggtgagtgtccgcggcgcgcccggggggcctgcggcgcgcgctgcccgctttattcccaggccccgggcttgcgcgggccgcgggaaaggggaggccgcactgtgctcgcaggcggcggggccggggtgggtgtccgcggggcgccgcgtcctccggtccccaggttgagggtgcccgggttgcgaccgtggggtgcggagaccccggggaacggcgcgcggagggggagggggcgcgcgactgcactagcgccgcttgtgcacccagcggcgcccgtgcacctcgcgctcggcgagcccggcctcagggaggggcgcgcgctgcgcagcggcgggaggtgggcgcgcgcccccctcagccagggaagttctagaagtgcgggggaggggcccggcgacccgagattcctctctggcctctcctccgcctttcccagagtagtactgtgcgtggacgaggccggatcgcgagggcctgggtttcggggtttcaccccccacccccacacacacctttggccctgccccgcgcctattcaacctccagggccaggcctgccctccgcccccacaaactggttcctctgctttgctgggttctgttagaactagtcccttcgactccccgtttctgctcccccccccccgctttggttttcatggagagaggaaggggtttttttcttcctgcgactcgcaccaggtttcctgcccccaaggcgggcttgggtgccccctctggcaggaagtggggccgggcgcacccgcgtggcggtgcatgtggtcggggtgcgccgtttcccgcgcctaaagggctctgcgcccctccccctcgtcctagctcctagaagcgccggcctacaaccaccaggctgggacgccagcgaaggcatcctcattctggagtagagggcgcctgggtcttaacctgcttctcagtaaacaaagtggcggtctgtgcattccgcaagaacctccattttaccaagttgctgtgtgaccttgggctattgaggggtcttctctctatatttaaagggggaccctttaagacccttaacaataggcctgccgggatgttactcctctggtagttcttgcatagttactgaaacgttgaggagccacagcgtgtgcacccgtgtgagagacaggctggaggcccaagagagacacatggggcttggactcctaaatgtgacttggccatgccagacctccctgatgctcagaaacaggtggaagaggtgaggttttccttggcctcgctggacagagactctaagcttaattcagtgggggcattggggagagcaggtggtttagagtccctaacggcaagaattggggaggcaccaggtggcaaaacagtgtccgggagactggccaggatctccaggcaagctagatgcatgcaaggtctttgggattggggcaggctttcccccaagagccccctctgaagggcctccagcagacctcggtgtgaggtcagtgctcattagctgattaattttgatgtttggtttgaaggacacctgtggtgtaatgtaaggttctaatcacagcctgtaattagagaacagaccaagccgctaatgatgggagctggcccagccaccctgtttaaaggagtctcgagtttgaaatctcgtaatagaataatgagcagagtccgcaccatctggggtctcttgatgcttgagaattaggaaaccgttaagtgttttagaaatcaaaagttttcaaaatgttttcctgtcgttgggtcaaaattatcccgttgcctcaaatctggaaagagggtgggggtggggcaacttgtttggtaagagcactgccccgcgtacaggatggacccttggttaactccagcctggtcctccactgtggcagtgaggtagctctgcaggtgccatggagcctgtaccttcacttctgccctcgctaaggacagcctgggctgctgcccaaagcttctcctggcctcttaagtacgggacacagggtcttgtggctgtcttccaataaacacaaacacacacaccacacgtgtggtgctggacctcagttaaaggacttcttgctacccagtcttttacttggaagggtctattgagaatctgcccttgccctaaggtagttgctagctatcaaagcacaactccagtttctcacgaagaccctcggctgctccctctgcacatggccaccctctatagatcttaaggatcttcatttactctgggtctcaggcttgagctgcggactgggactttcccttcttatttcaacccctaactaagggacaaggtagcgaatagcctcaacttgccccaggtcgctctgggactctctagccgggtgacacctcaaggtcaccacccttggggtgtgtgtggcaggggtagcgggtggagggaacacctgtgtaactgctattttgtctccgtgcatctcccccagactcactgtgtgctgccccacacatagagaaggagaatgagcgagtcgggctcaaagtccagccagcccctggcctccaaacaggaaaaggatgggactgagaagcgaggccggggcaggccacgcaagcagcctccggtgagtcctgggacggcgctggtcgggagtcaggtgggtgtctaaagctttgctcctgtttcctttcttgggctgggggggggcgggggtcagagctgactctttgcgcatgtgtatccctgtgtatgcttactgcccagaggtgtccagctcagtgtctaaggtcacagtgaaggcagccatgtcttaacattcacccagaaaagtgggagaatcagaaagaccagaccctatcttaaagaaaaatttttttttttttttttaatttttttgccctggtcagaacggagccaacaggcaggcttcgactggtggtacacggttttaaacaaataatcagactcttgttcagttgccttcggggctctacatctggtctttctgtttctgcacttccctaagtcaggtggctgtgtagatgtctgcttgcttacccacctacttaggccctggctctgtagtagacattgaggttctgggggtggggggtgtccctgaacgcctggcctgtctgtcttcacaatggagatgcccaccctctcccaagtgaggagaggctgttggtggccctgcgaaggtgacggagtctgtcctcagcaggttgtcttggctgggaaaatctgatgggtgatggaacttagccgatgtctccaggtggtggtcatgggaacaaggttcctgcagacctgtgcccttgccgtctggcctcctggttgtggagagggttttgggtttggatgaaagtttgcggtccaggctggcttcagacactgcgctcctggctcagcttgctgggtgcctggattgatcaggagtgggaagcaacgcattttactcaggccgcgagagggatttcctatgcaaagacagggggcggggggggggggacgctagcaatcatggcccgggccagaccactgctttatgcttgatttatctgacactgctagctaggtgttccccaccaggtgagatccgctacagggtggggccttttgcagaagaccagaaacataatattagtcaggtcagggcacctaactgtttcccttgcttgagtgacagttctccccagggatctctggtttctctttctttggtataaaacttttagattttagaggcttgaggacaggagcctgatgggggtgtcaggcaagtttggagtctccatggtgtgcctgctgcgtcttctgcagactctaggttggggtgacctaggggccagcacagctcggttggtactgtttccctgactcccagacatctttgcagaaagagcccagtgaagtgccaactccgaagagacctcggggccgaccaaagggaagcaagaataagggcgccgccaagacccgggtgagcctcctaggggacatcctgcatggatgccggggttagcttctcaggtctgggaaaaggcaaggtgggcagagagtaaaggcctgtgccagctctgagctgagaatgtcaccctcgttcatcccaaggacacgaagggtttgttcatgtggggagggcagagtcatggtggcatcagcctcaaaaatgttcttgtttttattttattttttaacacacgactcatatcctctgagtcacttgtgaaggggggagaaggggtgcgtgtatgttgggtggggggtgggggctggccagtcatcatcagctggacttgggtggacctgcttgtggggtcctgggctgtcctgagccagctccatctccgtctcgctgggctcgggtgtcccttgggttctgttcagcactttggacttaaccttatgttttaacccctggcccttcagaaagtcaccacagctccagggaggaaaccaaggggcagacccaagaaactggtaggtgctcgttgtgtttgctgggtgaaaggtgggttaaggatgccccagagtgggcatgttgaatgtctgagcatgcgtgaaacatgtcacataagttcagggttaccttcctcttcagagatcccttgtctccagaaaaataattcctgatatcaggtactcactatgggagaagccctatgggaccttattgggccctcaaagtgtcctgtgtccccaccccttattactgttactaggaccctcatggaaagatcaggaagtgaagctctggatagggaactgggtaccatgcagccttgtttctaagctgcccaagacaaggtcattcattcctgtgctgagccaccccttccttaagtggaggggctgggggcccctgctggcgtggccctaggagtgagtaacaggaaactagttgtttttggactgtgcctggcatggtgggggctgtggggccctgtggcgtcctaacattcccgcccagtgagggcgtccctggggctcgtccttccttcccatcctgggaagggtcagccactggacaccccaggccttcttagaaccagccctgcacctgctctgtaccgccccatggctctcccattcttgtctcttgcccttctgccccctctctggagagccacttcctcagcccttggtatagactctgggtctggcctggggggggggggggagggagagagagagagagagagagagagaaagagagagagtgtgtgtgtgtgtggtttgtttttttttccctccctttaaatccttagtttttatgaatgaaagcagcgtggaggttgctgagtcacccacacactcagccctgactcatcccccttttgcagaggaaagccggggagggaggaggggggagagaggggtgttggctgagaatgaaggccagtccttgagtcgctctgcctcccacaggagaaggaggaagaggagggcatctcccaggagtcctctgaggaggagcagtgatcaccactcgcagtgccgcctgctccatagccactgaggagcagctgtcccctgggactggaagccctgctcccaggcccctccccgcccccactgcacactaccgcaccaggcaccagctgcaggctctgctccgcagcacccaagggagcaggattcggctcagtccctgtgccctcctcccgaacacacctgccccatcctgacaaggctaacttcccatttagccgcagcccggcctgctgcgcacctccctcagagccgtggctctctgggcgctttgttttgcgggtcccttctgccctgctgttcctggcttccccgtagagggtcctgggagcattccctggccttaaggggccccggccccatctcactctgacaaggcccagtggctgacctagcagcagcagtgtggtcagggcaggggatgcttagatcccagcatgtccccaccaaagtatcaccgggtgggtttctcagcccctcctgccccaccctacagagatcatgcactgggttggctgagccccttgacaacaggaagtaggatgatgttggctccacccactttaatgttctcacctgagactagacagatggggttaccgcccatctccagagtaagggcctgttctcgcctccaccaaaggcaaacgggcaccaacacgcctcccccagtccactctaggctgttccttcctcccgcagggcactaaggagctagccttgccgccccctccttttcgctcctccctgccccccatggttctggttccatcttctcctctgttcacaaactacctctggacggttgtgttgttttttttttgttccatgttcattcttagatacccactattgctgctgctaccagcgtcagatgttcatcctcctgaatttgcctgtattctctcccccacacaatacactcgaggggaaggggggctggggcgcagcagactggttacctaccccacactaaggaagatggggccccaccccgtggatgctgcagcagagtgaggatgggggcccactttgatgggaaaagggtgtagggccacctccccttgttctgtgggggaggggtggccagtatttgtcccagcctggggcttcctccctggtttcttatttgcagttacttgaataaaaaacaaatagccttttctggacagtctctggtgtaaggagcattcacagtaaaaggggcggggccgactatgacccttccctgccccaccctgcaatggagtccacccaaggagggcaacttgaagccacaaaagtttttatttacaaaacatatacacctatacatctggacctgtcaccgtgggaataggctagtgtggaagagcggctgcctggaaggcttggctcggggccagctgtaggtggttagaatagacagatgctcctgtacctatctgggtgagtggtggagtgtggacggtcatgtcttgatgtccagcaggggcatccgcttgtgctggtagctgctctgccagccatgaaccacctgtcaggaagagcaagccactgcagcctcactgctggcaagtatttgtaaggatgacccatgacctggttgcttagagtgaggaactggcctcctgttgcaacgtggttcttagccagaaatgtagctcaccttggggtctcccacatcagagagcagctcctgctcagcttcctggagttcttctgcagggtcatagctatacatgggaagcagatgatggcgaagccggtccaccctgggagcgggagcacaggaacctcagccccgcactatccggtgtctcctcccctcaaaccactgggccagaaaggaacccatttctgctagggtaaagggtattagtaccagggagttagggcactcaccgctttttcttctgcacatacattacctgtaacagagacacgtactatggggctggggaggcaagcactgcccagtctcaagacccacttccacacccttaataacagccgagatgctgtggccaccaaaccaggcccacccagcagccaccccaggcaagtctgaggattccttaccacggccaccaccaccccgaccagggtgatgaggaagaaaggccccagcacatagcccaccatagagtcgctgttggcctggggggcattgggcactgtcgtgttactcatgacatcagtagccagatggctgaatggatggactgcatgggcagtggtggcctcgggagggcgcctcctctgggctccctggggaggaggaagggaggatatcagctgtacctgtggtgacaagcaggtctggaaatcccggaaaacttaaagccaaacactaatgaccccgaggtaaccagacaggcccagatcccatccaggcttggttccggcccagcgtcttacaaacaagagggtgtggcttagcttggatgcctggtagacatttgcaggtatcaactgcttggggaaggttaggtgcaggtgcacggctaaatggagagaaagaaatagctgggccttcactgcggtggaggggtgagttaggatcatgtgaaggggttctggttccgttcccccacggtatgaaggagccacaggcctgcatccttgtccctggtgtaatcctatccacggtcctcagcatcgctctcaggtacgagtgtggacattgtgtacagatggacagtatctaatctagatgaggtcacctgcctctagtacacccggggctccgcctatgtccctaccctctcggccagggctgacaggcagaggtggagagggtcgcccccatcgacagaaacgcgatcatcctcgggcggcagcactgagatggctcaagttcctgtcccagactctcagagagaggaagaggtactggctgactgcctcatgtccatgggtcagttttgccagttcccagttgcgagctccccgtctcaggccgaggggggcgaaccagaaccgaaaaggtatgaggccactcttaggatgctgctggcccgcctgggtgggcagatggttcccagctgcggggaggatcgggggtattggggaggggatatcgaggggccgatgcccgcctagataccttgggaccccggcaccccaagctgctccgtgcgggcgcgctgctgcccatccaacccggccatgccttacctcccgccgtgcagccctgacagcaacaccttgggttggccccggccccggaagagtcctccagcgcgtgatcaaaggagcgggagagaaggcggggccttggcgccccagtccagcatggtggccaatccggatgcgggtgggcgggccggacggggtcctgcagcgtccacgccgcggcagcagggggcgaccgagggccgcgcagcgggaaggttgcgggacggcgcgctttcccggctgcacacgggcgggcggggccagtggtcaccgcaggatcctggcgactggttgtccgcgggtagaggcggtggccgagggcctcactcctttctgtccccgcgtcttcaaagcaggttgccgtgaaactgaaatgatggtgtgggactggagcccagcacatccctgtggcccgaatgctaagctcattgaagcactttccccactgtgcgatgaggggaagcacagatggagcagcggggtcacttgcttgagtcaggggcagctcagtaagcctgtgtccaagctgtgatcgtctgattattaaagttacttagactggacaactctgagtaagaagatcacgtttgggggggagagatagatcagcggttaagagcacttaattactcttactgaggactcaggttaggttcccaacacccacgaggtggctcacaaccatttccagaggatgcaataccctcttctgtgccccgagaacactaggcaaagcaggtgataccggcaaagcacatatcaacacgggatgcaacaaaatttatttatttagtccgtgactaagtctcatggcgatcatccttgcaggcttggaactctctgtgcgtctgtgtgtgagcctcctggatgctaaaataggcatgtatcaccatgctgggggacagagccccctccctctttctcttgtatccctgacatcttgaattcctgattctcctaccttcaggtcacctcctaaatgctgggatcctgggcttcccaaatggtagccaagcgttctaccaacagcgctacctctttctccctcccaccctcccaccgtttctcctcctctcccctctctccctcctcctcacctccacccacctcttctttctactgccagagtgttgagattaaaggcccgtttgtcacaccagcaggacatataatcacagcatggaacctacacttactctgagtgggcattatagtttatgcatacatacctatagtcctgccccaggcctcttctccccctgcctaggttgaaagccatctaacattggtggtactgaagcaaagcctcctgagtcaatcagatggtaatcaggacaagggacagcctaggtgccctattcttgcacagaaaccccaaggggcagatgtgaggtaccctgagctagccccccttgctacttcctgcctgccatgtggttatgagtgagttcctctgtctggccctgcctggattgcctcagacctttctggagaaggataattgacagcaggtcaggtgcagaggtagacccaacagggaagcatggccgatgggaaccttgacaaacttcgtcctcagacagcaccacctgactgggggtaggatggggagagggaaagaatcaatgaaacccctcagcctggaggttgcaggggcatccgctgtcaccttcagcaaagagacgagacaccttaggctgtagaccttcaaggatgtccgagattttagaagtggggctccttcctccgttgtccagatccccagcttgtgtttgttgtcgggacttttgcagtttaacttttcttttctctagacttctctgcttccacctccggagttctatgacagctgtgcgctacaaggtatccagcatgtctggaaggctagttcatgtattcaaagggccagggtctcgggggcctggcctcaatcctagaacagaaactctgataaactaggaagggcagggagcagcctgaggccccaggcagtgtgacagccagcatcttgtgaaggacagggaacatggtgggtacggggtctcttcctggatgctctgggctggcagctgttccagagctgcatttatcattttacattcagattttttgggttttgtgttgtgtcttggttaaggtgtctattgccgtgatgaaacaccacaaccaaggagcgaattgggcaggaaagggttttcatagcattgtcatcagaggaagtcaagagaggaaccccaatggggcaggaagctggaggcaggagctgaggctgcggccatggaggggtgctgcttactggcttacccctcaccatggctttctcagcctgatttcgtagagaactcaggaccaccagcacagggatgacgccactcacagtgggctgagccctcccccatcaatcattaatgaagaaaatggccaaacggcttgcctacaacctgatcgtatggaggcatcttcatgacagagaccctctcctttcagatgactttagcttgtgtgaggttggcacaaaactaagcagcacagtgtgtgtgtgctgtgaaggatcggacccaggaccttaggcacactttgggtacctcctgtgggtgccctgccactgaaggacaccccaggcccactccttttgcttgcctccttacccagactgcatctgaggtcattgttgggactggagtggccatcctgaaggtcctttttgctctgagcccttccgcacaatacttgccaaataaaagaaaccaagaaggctgggctgtttccaagtgacacaacttcacaatatgctcagcaaggcaaaggtccaggaagccaaaggcagtcaggaccgggtgtcctttatatggacggacctaagggaccagcgctgcagctctgtgcaaggtacttgcttaggatgcgagaggtcctgtgttccactcccagcaatcctcaaaaaccactttaaaatcccagaggaacaggtatggtggcatacatatttagtccgcagctttcaggaggcagaggtgggcagagtttgagctagcctggtctatatagaattccagggcagcccggagaaagaccctgtatcaaataaataaacagaacgaaaaaacctggaggtactgtgaagaggcaggaaaagaaaccagctcaagcagaggcaggtggatttctgagtttgaggctaggctggtctacagagtgagttccaggtcagccagggctacacagagaaaccctgtctcgaaaaaaaaaaacaacaaaaaaaagcagaggaagaaggatcccgtctcagctcaacttctcacgcactatatgctgcctggttagtttttttttttttccttccttccttccttccttccttccttccttccttccttccttccttccaagattaggattgcatgtagctcaggctagcctcaggttcgttatgtagctaaaggtgggccgcctggctctgtccgaatgaactcctagcgtgtgcatccatggctggctgcccctcggtcctaccattggttgttttagagttggaggctctaatctccaatatcacaagcatattgtgagccccatgggaaacgggacagtccaggcaaagcgtcagcttcaggtcctcaaacccactctggggtaaagggtcagggggctcctgcacatgcgccacaacagtcactggccctggagtttgtggaagtgggcatggcctttgttctggatctgtttcttcttgtcagctcacccctgcggtccggaattctgcccgtgcccctgggcttgtggccatgttaccccagttcttccagcaaagcaagctgcgagtctgtcttgtgtcccggcgtctgaccctgctccgctcctctagcctcttactccataagtttcctcccttcttccatggctcccaaggtagcttgttttgcaccaaggtgctagaaaagcatgtgcactgcctctgtctctgtctgtctgtctgtctgtccatccgtccgtccatccgccagtccgactctctgtattgggatgcactgagtggatagagtgactgttgctggtcacaaattccatttactgtgtcttcaagatgccactcagctctgttttctcctgcgtgaatttccaaggaacccccagctatggtggcggggagcctctcctctctgaaagcacctcggaatgggggcatgtccaaggggacacagtccagtttagaggcaaagatctgagaggcttcccaaagtggggcactgaacatgtgaacaggaaacactgcggcagcgtctaatgcatttggggaactgcaacaagttccaggaacagtcggtcaccaaaggcagtcctgtggcacccaatatggtggccactgccatgtaaggtcccagctggccttcctgccaggccctctggcctcagtttaccattttcacagcactgcccaccatgttacaaaaccaacagtcactgtcactaagcacagcctgggccaaggtgcttcctcatcctcagaaatcctcagacgtttcctcctttgggaaggacccagctcacccctgagccttttctgttaacactgaagatcttccttgcataccctaggcaagttttctgccaacctacttgccctctctggactgaaacgatgcagaagagcctgcccgtgcctcctgagtgctgggagtaagggcattgtatattagttactataccgggcttaaatttcgtttttctgtgtccgtgtttatgtgtgtcggtctgccatagtggatgtgtggaggtcagaggaaagctcatagcaactggctctctctttccatatgtgggccctagggacaaaactcaggtcatcaggcctggtgacttatgcttattactggccaagccatctcaccagccctttgctgcttgttgtctatgtatttacttatctgtctgtctgtccgtccttatgtccacccacccacctatgtgttgaagacagtctaatgtagtcctggctacattcctggaactcctatgtagaccagactggcctcagagtcacagctgttcctgcctcctgagtgctggattaaaagtgtacatcaccaaggcccatatgcattttatttctgagacaaggtttcactcactaagttacccaggcaggtcttgaagtcactctgtagtctgggctacccttaaaccttcaattattgtgccttggcttgccgggccctgttggactccattgttgctgtgttgttgcttctgtctgtctgctgttactagtgagctgagcaccgtcctgcctagctatggcaaaactgccaccaagaacaacctaaagataggatggctgctttttcttgtgtgtgtgcacgctcatacacgcacccacatgagcctgttcaagtacttagctgtttaagccatagaggaaaagcaacagagagcaaatcagacaggtgccaggggaatctgcctgtccaaatgctgaaggaccttgtccccaactacttttggatccaccaataaaaatgtcagcagctgagccaggcgtggtggcacacacgcctttaatcccaacactcaggaggcagaggcaggtggatttctgagttcgaggccagcctggtctatagagtgagttccaggatagtcaggactatacagagaaaccctgtttccaaaaaccaaaaccaaaaccaaaccaaaccaaaacaaaacaaaaagatgtcagcagccaatggctgggcaaagggaaatggggcgggactcttagatctgtgaaggccaggaggcaggggaggagagtcgccaggacctgggagagtcggatcagatttagagctgcagagggaagatctctgaaatgtaggggaaaggggaagcccgcccagaagctagtgtctcggacagcatagaccaatgggcctcacggaaggtaacagagtagcgaagttaaaagtagattcagaaggtgttaagacaggggtaccagaaggaaaagtatgctagctgcaggaggattagaactgcccaacaaaaataagctcgtgtgtgtgtgtgtgtgtgtgtgtgtgtgtgtgtgtgtgtgtgtgtgtttcatttaaggatctaaagagctcaggggccgggtggctggaagcgccacccgccaggagcataaggctgagtaggcaaactccaggctacagagtcccacatttagcacactgctgatattcaggacaaagcgctgaggctcatggctgcagccccagatattctcctattggccatgacgagaaaacgaaccattcagaccccaagtctgcctgcaccagaaaggctgtggcttacaaccagctttttcccacacggtgaccagatctccagggatggcagtcaaaccggacaggggtgagcagaacgtccacaagggctggcaggaatgtggaacctgtccagcgtcaggagccaacctgctttcctcggggtgagccccccccatccctgtatgtctaagatataaatcctggtcagtctgcaggaagacaaccttacagttaccccaagaattacctcaaacactgatggtttagtcataaaatgtaggtcagaggaggtcttttttgttttttaagatttatttatgtgtgtacactgttgctgtcttcagacacaccagaagagggcatctgatcccattacacatggttgtgagccaccatgtgattgctgggaattgaactcagaaccactgacatctctccagccccaagagggagtctttttaacaccccagttacaactacaggacagttggctcgttcctcagattcgcatctgcaatccctgttaaggaagctgaggtaagaagattatgagttcaaggctgttccgtgtacataggatctggtcaccgggaggcaatggctctgtgagattcaggatccccagcctggtctacaaagtgagttccaggacaaccaggactacacagagaaaccctgtctcaaaaaaacaaaaacaaacaaacaaaaaaacagtatttgacacacgtctttcggggtctgttcttttcttcccagtggcttcctgagtggttcttaaattttttgtttgtttgtttattgtcaccctggaggggaggggctatcctctcatgtgtgtcacagtgtaggtgtcagagagcggttttatggacctttcagcatccaccttgtctttagttcttgggagcagccagccacctgcctttatccactgagtcacatgacccatccatcttctgatcccactgcgcttgccctccctgtcacccccacccccatcccctttgctgggttcttgaggtcaaagatggtcccatgaaagtctctcactttgccattcagggaactggaactggtcccacaggcactggggcagttagggcctgttttgtctcctctgatgaaggcactgacatgcatggggcagaccgccctgccttcactctgtgctaaggataggccagtcatacccacccagccgggacagggctcagcacagcttggacgtattgggggtggggcagcattcagtaagctctggccccctggccccaatatggaaaaaggtggcttccctgtttgccattgagatgtgggcttcactctgtaggccattctgacttcaggttcataggacagaccaccataccgagcttgaagaacagttttagtttaatgaaaaacgggggctgtcgagatggctcagtggctaagaacactgactgctcttccaaaggtcctgagttcaaatctcagcaaccacatggtggctcacaaccacctgtaatgagatctgacgccctcttctggtgtctgaagacagctacagtgtgcttatgtataataataaataaacatctaaaaaaaaaaaaacttttgggctggtgagatggctcagtgggtaagagcaccagactgctcttccgaaggtttggagttcaaatcccagcaaccacatggtggctcacaaccatctgtaacaagatct

SEQ ID NO: 163 - DNA, 1667 bp, Mus musculus
ccgggcggcgcgcacgcagcggtctcagcgcctctgccctctcccggtttcagatccgcatttgcgaccggcggcggtggcggcagagcccaggccggtgccctgagcccagccacgccgcacccggcagccccgagcgcgccccgccggcggcctgcggagctcgcgactcactgtgtgctgccccacacatagagaaggagaatgagcgagtcgggctcaaagtccagccagcccctggcctccaaacaggaaaaggatgggactgagaagcgaggccggggcaggccacgcaagcagcctccgaaagagcccagtgaagtgccaactccgaagagacctcggggccgaccaaagggaagcaagaataagggcgccgccaagacccggaaagtcaccacagctccagggaggaaaccaaggggcagacccaagaaactggagaaggaggaagaggagggcatctcccaggagtcctctgaggaggagcagtgatcaccactcgcagtgccgcctgctccatagccactgaggagcagctgtcccctgggactggaagccctgctcccaggcccctccccgcccccactgcacactaccgcaccaggcaccagctgcaggctctgctccgcagcacccaagggagcaggattcggctcagtccctgtgccctcctcccgaacacacctgccccatcctgacaaggctaacttcccatttagccgcagcccggcctgctgcgcacctccctcagagccgtggctctctgggcgctttgttttgcgggtcccttctgccctgctgttcctggcttccccgtagagggtcctgggagcattccctggccttaaggggccccggccccatctcactctgacaaggcccagtggctgacctagcagcagcagtgtggtcagggcaggggatgcttagatcccagcatgtccccaccaaagtatcaccgggtgggtttctcagcccctcctgccccaccctacagagatcatgcactgggttggctgagccccttgacaacaggaagtaggatgatgttggctccacccactttaatgttctcacctgagactagacagatggggttaccgcccatctccagagtaagggcctgttctcgcctccaccaaaggcaaacgggcaccaacacgcctcccccagtccactctaggctgttccttcctcccgcagggcactaaggagctagccttgccgccccctccttttcgctcctccctgccccccatggttctggttccatcttctcctctgttcacaaactacctctggacggttgtgttgttttttttttgttccatgttcattcttagatacccactattgctgctgctaccagcgtcagatgttcatcctcctgaatttgcctgtattctctcccccacacaatacactcgaggggaaggggggctggggcgcagcagactggttacctaccccacactaaggaagatggggccccaccccgtggatgctgcagcagagtgaggatgggggcccactttgatgggaaaagggtgtagggccacctccccttgttctgtgggggaggggtggccagtatttgtcccagcctggggcttcctccctggtttcttatttgcagttacttgaataaaaaacaaatagccttt

SEQ ID NO: 164 - protein, 132 aa, Mus musculus
GPVLASTKGKRAPTRLPQSTLGCSFLPQGTKELALPPPPFRSSLPPMVLVPSSPLFTNYLWTVVLFFFCSMFILRYPLLLLLPASDVHPPEFACILSPTQYTRGEGGLGRSRLVTYPTLRKMGPHPVDAAAE

SEQ ID NO: 165 - DNA, 29360 bp, Homo sapiens
agctccactgctcttccagggagtcccgggcagctgccagcagggaaggccctggagtttctctactcgctagcttaccagtctcccttacagatcccaccccagactgcaaggcatgcccagttcccagtagctgtatttcccgccatccagcagacctcagagggaaggcaggagttgggaggtgtcccagcctgggctggccaccagattcacgctgttcaccctctaggccactcaggtattctagagaccccctagtggctgggttcctagaaagtaagaaaataaagaggctccaacccaatttacagcgaggactaactgggtcttagagggtatatcgacccccgggatttatgggttggggaaagacctgaggactgggtgagcagggagcaggagaggaggttggcgtggaagagggagccagctgggccgctccccaccaccatctcctagccagattccagaccagcaggcttgcccagcttggcctgcctccctcctccgctctcccaccagtggctacctcccctcccccactctgctttcctcccctcccccagctacccacttcctctacccctcccccagcccttttcactctcattcaaccatccattcaccaaacttttgctgagcgccaagttccccttaggccctggtgcgaagcttgtgggtgtggagaagaacaaaacaaagccttggaggcttcccacaaatctccagcttggtgttggcccctttcccctagcccacctccaccccagcccagacccccacccctcgacctccacctggctctcagttccatctcctgactttggcccacagcttgtggggctgtatgtcccaccccaggtacccctgtgcttctggtttcaggcaggcagcgtaccctcctgccccttctaggacggagaccccaataccatactcagccctgagaaaggttcggggtgaggacgcagggtggcctggagtcctggtctcacatgactccctaatcaggacagtgtcccctagccgtgacacaccttcagtaaatggtgcagcctgtagaggcagaaggaaatgacccaaaactcatgcaaacccagacagcggtgggagggagcctgcccacagctaatgatggagaacagtcaggcttggaggctcagggcagccagacctggggtcactgttccccctccacagcccacaacacattcccacctggcttagaaagcaggaaagaggccaggtgtggtgactcacgcctgtaatcctagcactttgggaggctgaggtgggtggatcacttgaggtcaggagttcacgaccagcctggccaacatggcgaaattctgtctctgctaaaaatacagaaaaattagccaggcgtggtggtgcaaacttgtaatcccagctactcaggaggcggaaacataaaaattgcttgaacccctgccaggcgccgtggctcacgcctgtaattccagcactttgggaggccaaggtgggtggatcacgaggtcgggaattccagaccagcctggccaatatggtgaaaccctgtctctactaaaaatacaaaattagctgggcatggtggcacgcgcctgtaatcccagctgcttgggaggctaaggcagaagaatcggtcaaacccgggaggtggaggttgcagtcagccaagatcacaccactgcactccagcctgggtgacagagcaagactccgtctcaaaaaaaaaaaaagaattgcttgaacccaggtggcagaggttgccctgagccaagatcatgccactgcactccagcctggagcctgggtgacagagtgagactctgtctcaaaaacaaaaaagaggctgggctcgatgactcacacctgtaatcctagcactttgggaggccaaggtgggcagatcacgaggtcaggagttcgagaccagcctgaccaacatggtgaaaccacgtctctactaaaaatacaaaaattagccaggtgtggtgccgcaagcctgtaataccagctactcgggaggctgaggcaggagaatcgcttgaacctgggaggtggaggttgcagtgagctaagatcgcgccactgcactccagcctgggtgacagagtgagactccatttcaaaaaaaagaaaaaaaaaaaaagcaggcaagaaatagaaacaagagaaataagttaaagaccatatgagaatcccctgaaacttcagtcagtgcctgttccctagtgggtgtgacatgggtagcagcagtggctaaagttacaggacttgaccccccacttcctaatgctggctagtgagctgacatggacttccaatcctggtgtgtggcctgggaggcaaacccagcccaggcctcaagctggattccagaaaacacgccagcacctgggtaatggggtcacatgtgtgtgcagtagccatcctaacaggcttccttctactgactcacacgaatggggctttcacaggctacacagcttagcagtgcatgtgttttcagctggtcctgggtggaaaggggcatcgtgtttaggggcattttacctgcagatcctgttaacattggactgtggactgcacgttactcagaccaaagggaaacgattttgttccacaaaaagccaaaatcttgcactcatccagcccaactcacagtctggtgagctgccaccactgcctggtcaccaacaagcaaaccagccagtctgccccaaccaaagggacaaagtggttgttgtcagatggctgccagctcctgtgactaaacctgagatcaagtgaaaaaaacaatttcctgggccgggcgccgtggctcatgcctgtaatcccagcactttgggaggccaaggtgggcggatcacctgagatgaggagttcaagaccagcctgaccaacatggggaaaccttgtctctactaaaaatacaaaattagccaggcgtggtggcacatgcctgtaatcccagctacttgggaggctgaggcaggagaatcacttgaacctgggaggcagaggttggggtgagccaagatcgctccattgcactccggcctgggcgacaagagcaaaactccacctcaaaaaaaaaaaaaagcgcctatctctggaaggtgcaaaagccttcccacctgtctcaggcttggccaccctgccattcccatgatgattgctgggttccctgacctcttctttgccttgaggtttggggacagatgccctgtggcttggcctttgcggataacagaaaccactctggctaatcattcttcattcaacgcatttttttttttttagtttgaacactacgctaggccctagggataccccaaggaacacaaaagataaaattccgtaacctaatggagctggctttccagtggagggaactacacagaaaataccacacatatttatactcgatagcagttaaatagatgagtttatttatgtcagaaattgataagcgttacaagagaaaaagcatgatcaagtggatgagggattgtaagggaagatgtacaggttgtttgtttgagacagaatctagatctgtcccccaggctagagtgcagtgccctgatctcggctgactgcaacctccgcctcttgggttcaaatgattctcgtgcctcagcctcctaaatagctgggattacaggcatgtgccacaacggctggctaatttttttgtatttttaatagagacagggtttcatcatgttggcaaagcttatctcaaactctcaagtgatctgcccacctcagcctctcaaagtgctgggcctggctagagatgtacagttgtaaatagtgtagatgagtaacactgaacagagacctgaaggcagtgagagggcaagccctgaggacatcaggggaaaagcatgccaggcagagggcacagcaagtgcaaaggccctgtggcgggctcatgcctggcaggcctggggaacatcaagcagcccatgtggctgaagcagagagagcaacaggtaggagatgaggtcagagggcagactgcagggccttggaagcctctctttttactgtatgagatgagacaccctggaggaatctgagcagaggagaaacatgccttaggtttcatgtagagagattgaatgccaagaattaggtgcttacaaaaccattggaagaactggaggagccggctccatgctgggcccactggaacatgattgaactgccagcctggcctctgccctgatgaggagggtacagaatcaggaggccccacgggcatggttgagatctgatctagggtcaggaggccttgtgccactgcacctgcctcttgaacaccatgaagctagtgattagatgctggatgtcttgtagaaaacccgtatctccacagcccacacagcaatatttccctctgcacttcctcacagcaatatttccctctgtacttcctcccaccaaatttcactttattatttttattttttttgagacggagtttcgctcttgttgcccaagctggatagcaatggcacgatgttggctcaccacaacctttgcctcccgggttcaagcaattctcctgcctcagcctcccgagtagctgggattacgggcatgcaccaccatgcccagctaattttgtatttttagtagagacgaggtttctccatgttggtcaggctggtctcgaactcccgacctcaggtgatccagccgcctcggcctcccaaagtgctgggattacaggcttgagcgactgcgcccagccactttattattttgtttatgtttttgagacggagtcttactctgtcgcccaggctggagtgcggtagcatgatctcagctcactgtaacctctgcctccagggtttaagcagtcctcctgcctcagcctctcgagtaactgagatcacaggcatgcgccaccatgcctggctacgttttttgtaattttagtagagatgggtttcaccatgtggtcaggctggtctcaaactcctgacttcaaatgatcctcccgcctcggcctcccaaaatgctgggattacaggcatgagccactgtgcctggccccaaatttctttctttgatggaacccaattcatatccaaaacttgcttcaaaggaatgtagggcatggtgcataccaaatacctgcccaccgcatctctcacaggcccaagtccagccccatgccaaacaccctactgctcccacctgcctgcttcctaggcctcctgggatgctccacccacaccctgggcccctgccctgtgcttcctcaggctggcattacagcatgtaccacgctggtggaattgcctgtgtacttgtctatcccctcgtgcaccccactcaatgcaagccccttgaggacaggaatgtagctacccatttcaaggccacacccttggtggtggtacgtggagggatccatctggccaggctgggaggaggcagcaagcccatccagcctgggaatagaagcagtagagcggaaagaggcaaaatccttagctatttatatttaactgccccaagacttgtttggttatttttttgagagggagtctcactctgttgcccaggctggagtgcagtggcgccatcttggctcacggcaacctctacctcccaggttcaagtgattttcctgcctcagcctcccggctagctgggattacatgcacgcgtcaccaagctcggcttatttttgtatttttagtagagacggagtttccccatgttggtcaggctggtctcgaactcctgacctaaggtgatccgcccacctcagtctcccaaagtgctgggattacaggcttgagccaccacacccggccaagacctggttttaatacctgtgaaatggggcaacagtatcactcaccagtagggatgtggaggatctgagagaacatgtgcattcagtatatgcttatcaactccactctctccttagatttcttcaggggttggagaggagctgggcttccttggggatttagccctgaagaagtaagctgacaagtccatggcatcttggggccatgcaaggtgggtcattagctcacagtaggaaggcggagagggccctgattcctgggccctccttttcacttgagagtttttccctcgaaagttggaagcagcagaggccctcctccccttctaggcctgccagccttgctggcagcagaacttgtggtcagcagagcctggaagcctgatcctgccagatgaccagatgcactagtagctgggtgactcttgaggagagtggtcaaacattgtgtaccagggtagccccacctcctaccggcctgggtcagtcctggttgataggggccaggtcaggtttatgcctgttgtctggccataagtattaatagtgccgctttcactctgaagtgccctgctcgtctgctgaagctgagcatacacatcctgtgatccaataattcctctcctaggcacgtacgcaacagaaatttgcacatctactcacctatattctagaacattcatggcagcactattcataatagccccccgccagaaactatccaaatgtccttcaacagaatggatataaaattgtggtacattcatatcacatcactaagcagccctgagaatgaacattctgcagccacacacaatagcatggatgaacctcacagacataagggtaagcaaaggaaactaacccaggagaatacataatgtaagactccatatccctacgtgtgcacgaacaggtgaaacgaagcgctgcttaagttgagatggtggttacacaggggtactggagatgttgtatttcttggtctgcatgctggtgacacaaaggtgttcactttgtgaaaatgcatcaagctgaatacttaatagaactaaatggaaccatccacattagttttttcacctactcatctagaaaatgagcttaagagtcagcgtcccaaaatataaagttgactcaaactccccattccctggacattcccattgggttcactgaagctcactgggtcgtccttgagcaaactgtatagactgactccaataacagaaaatgcttcctgtggggaagacgggttctggtatcgaccaactcaaccccccgggccttgaccatgtccttggcctggaatagctccctcttcctgcttgccctgtccccaactcctcagccacccacctatccaagtctcacgaaggcctgctcaagcccgtctcctccaggacttccctgaccaccctgggctcccatcctctcctcctgtatttcctcctaagtctgtaagcgcctgaccccttggtccaagtttcaagagtgcaggggactttgttcattaattgtaccccaagaatttggcccagttcctgctacagagtaggttctcaataactactgaatgaaatgttttctaacatggcatctcctgtactgctattcagttttctctagtgcaggcctgattctgatttccctagacgtgaaattcgctgggacaaggactagatcctacccatctttttatctctaccactcgctcttctgcttaatacttatttaaaggggaaagaaaggaaagacagtgaattcagggcattgacaatccagaaagcgtggaggtgggggtcagtgagtagagagttatttggatttcaagggtgtgggtaatcctggagaggaacaagctactatatttatttgcctacgaatttatttatacctgcctccttccagaaagggtttgaggtggctgacaaaaatacacacaatacaaggtaaaaaacaagtcgctgaggaaatcaggccgagaggaaaataagagtaggaaaaataagatcgagtcggcttgctacaagtgggccaaaaagttggccaagttttccacagcccactcgaggcggaagtccctctcccctccccgtctcaggggcggccacacgtcccacacggacggggagagatgtacccgagagagagggcggacaggaccctctccgcacctccccagccgccaggccgccagcccggtgcccgggcctagcagcctccgcggccttggagagcgcgaagtggaggggcgcgcggctctggggggcagcccgagcccagacctgggtcccaaggtgctggcggggagcctgtgacctgggacggggtgctggaggctgaggaatcgcgcctccatgccacgccgcagaggttcccgcgctcgaaaccgaacgccctccagccaccaccactcacggcctactaagcgcgcgctccgggcccagggcacaaagatggagggagcggcgcgatccacccgccccacccccacccaccagacaaaggggcaggccgcccctcccccagccttcttcgcgggccccgccgccctctgctcccctcccctcgggccgccctttggtgacttcctttcccctccaagggcggccccgggacttctcaggaactgcgtttcacctggacgtggggcggggagccggcgcgcagagggcggcctccgggcccacccctaggccgagccggccccaggcccgcgccctcccctttgaacccgcgctcccggcccctggcgccttcccgcccaggcgcccccgcccccacccggtcaagcacgtgctgcccgggccccgagcgcttcccgccgcacgggtgggggctgggcccaccccccgcccgctccccacccccaccggaaacattcctgccacattcctgcaactgcaaggcccagcccgccgctccccaccccgcctccgcgccgggcccagggctttcctgcgtcccctccaccgccggctcgccccctgaggagggggctgggccagggcctcggctgaccggggaggaagaaggggagcagagaaaaacatgagtcacagccgtgtgtcactggagcgcatttcaattccctgcatcacaggaggtgtggaaggccgcctcggggaccgggcgcgcgaggtgcgcccgagaaggccccgggccggcctgcagggcgcgccgctccgctggccctttcctcccccaccgccctccccgccatcttcccctttggcttccttctcgctcggtgcaacaagtctttgttaagccgggcgccgggcgggccaggcgtggcggagatggcctgcgtgctcggcccctgccctcaaagcgcttccaggcgacctctggcccaccttttatttttatttacagtcccaacggaagggcccaggtccccaagtgggcctgcgtatctccagaacaccatctaagtcacctcaaggtatgaagcctcccttgggtgtacctgccaacgagccaatcgttggtttcgctggaaggctccaccttgatcatggctcgctggtggccattaataaaacactttggatttcacaagtttcacgtttgaatttcacaagacttgtatctcaccaatcagccacacgcgggttgacactgaaaggcacatgctgacacctgtccgcccaggggaaatctaccatctctctattttagttagggggcggcgtgtaggccgcggaattctctaacgagcgcgtttctcttcaccccctgggcccgcgtggacccccgtccacccccacacgccctggagggggggccgggcccacacgccctggaagcccctagaggtgactctccctgggacccctgtaccagggaggaaggataccgccacccgtcaccaccccccgccagaagctccttcgtgactcctctgcgcgtgccttcccacacctcctccgtccgggactgcgaggagtgggcggtcgactcgagttcgcagcccaggcctcccacacgcccctccctgccgtcagcacccacccgcgcggcagcggcggcggctggcgggcggccgcccttttaaatccccgggctcatttgcatggccccgccccctgagtgacacggctggcgcgggcgggcccgtcccccctgcccctgggtcgctctttttaagctcccctgagccggtgctgcgctcctctaattgggactccgagccggggctatttctggcgctggcgcggctccaagaaggcgtgagttcgcggccgctccggtggcttcttttttttatatctataatttaattaaattatttatttattgaggccgcgcacgggccgtgcccagcttcctgcccctcgccatccttcgggggagggggaatatttttgtccccccgcctggctgtgacacataaataccccgcgggggcctgggcggcgagcacgcggcggcggcggtctctgagcgcctctgctctctcccggtttcagatccgcatttgctaccagcggcggccgcggcggagccaggccggtcctcagcgcccagcaccgccgctcccggcaacccggagcgcgcaccgcagccggcgcgaagctcgcggtgagtcgtccccggggcccgcggcggcggcggcggaggggggcgcccgcgccccgcccgacgtcgcccctcctcgagccgcccggggctgcagcgcgcgccgccggctttattcccaggccggggcggcgcgaccggcggcgggggagggccgcgcggcgcgggggcgggcggcggggcccggcggcgcggggaggacgcccgcaccccttccccgcgccgcgggcgccctgcggggggcggggacccgggaaaggcgcgcggtgggggagggggcgcgcagctgcggcgagcgcgagttgtgcacccggcggagcccggaggagcccggcgcacctcgcgcggcggccgctcccgctggagccggagcccgagcccgagcccgagcccgggcccgggtgaggggcggggagagacacgggctgcggcgcggcaggagagtggggggtcgggcgccccccgcagctcagggaagttctggaagtgagggagatggggaggaacccccaaattcggccctacgccctctcggcctttctctcgcgccccctccgcagatgaggccggagcgcgggcctgggtttggggcttcaccccgaccccacctctggcctggcccgcgcctcttcagccccaggggccgggcctgccctccgcccccacaaactggtttcgctgctttgctgggctctgttggaactagtccctttgactccccgtttctattttattttcttctggggctttattttgcggggaggggacggagggagggggctttcttcctctcccccgcgcccgcgcgcgccaggtttcctgccccaaggcgggcttgggtgccccctctggcaggaagtggggccgggtgcacccgcgtggcggtgcatgcggtcggggtgcgctgctttcccgcgcctgcaggagcggcctgcgcccctccccccgcgcgccctggccccgggtcccgccggccggcctgcaacggccgggcgcagacacttgcagagtcaccctcgggccgggtctggagcctgatgcctcgggggtttagccctagccgctaggcgggtaggcaaagtgtcgggttgaaagggtctccgggaacctacttcttcctgctcgccaacttgctgtgtgaccttaggcaactcaaggcttctctgggctacttttttacgggggacggggaagaaaacaagggaacccccaagataatttcctagggcctttcctgcagagtccttaagtatttgaggagcacagtttgcatgcacagtgtatggaggagacaggcttgaggcccaagcgggcttattacaaagtgagggattggggttaggccctaaatgtagttcctccaagacaggcctctgatgttcagaaacaggtggaaaagacgaacgtttcttggcctcactggaaagggcctcgggccttcatttagttcgtggggggttggctgaggggattaaagggtccccagcagcaagaggtggggggaggcaccagatggtatgagagcttccagggagacccgccaagatctccaggcaggccgggccaggctctctgggattccggactggcttcgcccaactggaaccccctcgatgagggggccccaggcagaccttatatgaggtcagcactcgtttagttgattaattttgatgtttagtttgaagggggacctgtggtgtaatataagattctaatcactgcctgtaattgcagagcaggccaagccactaatgacggagcaggataaatcaccaaccaccttgtttaaaagggtctccaagtctgaaacattataagatagaataattaccaaagtcctgctgtctggagggtctcttgatgcttgaaaatggaggtcctgggccctctagaaatcacaagtttgcaaaaatgtttttttcctctcattggggtaaaaactctttttcttcttttttttttttcttttaaattagacatgggagtcccaccgtattgtccaggctggtctcgaactcctgacctcaagcagtcctcctgctttggcatcccaaagtgctgggattacaggcatgagtcacctcacctggcccataaatcattttcaaatggtctagttcttattttggttagagtgaagatttctttctattattttaagtttttctaaactattacctagtttgatccttgaagcagtcaggaggtagttcaggcaggtaccttataattaccttgatcttacagattgagaggggttcagaagtggagccgcttgtcccaccccttaccatggcaggcagggattggttactggaaaaatgtgtagcctaggcctccggcgtctcatccatctgtagcctggggataaggactaggataagaagatgtggaggactgtcctttttaagcctgtaatacagggtattcccaaatacaggttgcaggccctccttccaatgagaagttttaggaaaactcaaaattgatggggttaattaaaccccaacaggcctctaagaagaaggaagatgctagaaaatgaccaagaaggttttaggatgagccctaaacctcatcctaaaggatgagggccagccagggtctgttaggcggtgcatttcagttggagaattccctacccatctgacaaagtcccatctgactccagttgggcagaggaggggtaaggggaaagaggagggtggcctttggctttgggctcactttcctcccccacctcacccactagcttcaaccatctcctccctccctcaattataccaatctgaattctccagggatttaccctgggtgagaacagagaagagagctggtggtgggcaccacccctggctgtgtgattggctctttttggtcctgagtcttgcaccttgccagataggcaatattgtcagtgaggtgggcaggggatcaatgtccatagctgccagatcgcaaggtctcattctttccattttcccactgaactgcgtaggctggattttctcttaaagagaaagggcagcagttgactacagaaggaggggatgctggcaatacgtcagatctcacctccccacacctttgtcccagggtggcctcacccatgtagctaggtctgggctggctgtacctcctgggaccccccccaccacgctgcactggggcggtgttaaggcaggacaacaaagagcccttctgaacaggagatagataagaagctgattagggccaacggcccttccccgcccttggcagcatctgggggtgggcagacccctccatcctgggcagagtaggaggcctgggggcccatgggagcacagttttctgcagtgtgccttgaaggtgtgggtgatgagggggtagaaagtggctgaagcgagatgtttgtctaaaagcacttttctgtctcccagcatcccagccatcactcttccacctgctccttagagaagggaagatgagtgagtcgagctcgaagtccagccagcccttggcctccaagcaggaaaaggacggcactgagaagcggggccggggcaggccgcgcaagcagcctccggtgagtcccgggacagcgctggtagggagtcaggtgggtgtccaaacctttgcttcacttggtttaccctttggggctagggaggtgcctggagtttcattcagcaggcgagaccatgcatggagggtgcagaatgattctgcgcagtaagcgtgtgggtgtgtcctcccacctgtgtgtactcctgccccacttgcaaccctggtcagatctctatagagaccccaggagagaaccgggggccgaggaattcaagataaattctgaagccaatggcaaacagtccaaacctaaagcaccccagaggtcacatggccagtgcttaaaacactcgcctttttcttaatttccaatccactgtggaccagtaattttaaaatgcagtaaagacgaatgaacaaaaatgaacatagaagcccagggtttttaatcattagattcagtgcacgtaaaatgatttttgtcaatttgctgtaaagttgctgaatacttatggtcgattcttgtacttcctcatcccaggtgagaaacgggtgcctgcgtgggccagcacctgtttgtgcacaggccagttatgagtagttctggaatgggcattgcccctggctctttagatggaaattgaagcccaagaagtcaaaaatgttggggagttggtggcagtgaccctcagaaccctggtgctgctctccccacaaagtcctcatagaaggatgaggctgccagcctggcgctgtggggcaccctagggagcatggccatttgggcatgggggggaccccatattggcctcttacagaggcagctgtcacccaagtgaagggtggctgttggtgaagcccagttacttcccttccctgggagagaggtaagaggagttgagttcgacctctgccccttaaacatgatacaggttgttcacctgcaggttttccctgtccgtacggtggagagtggtctgtgctgacctgggcccagggagacacgagctgtgaggagtctgctgtgttggaattcagagcctggggtggggtcatttgtcctcttagcctagctccctcagcctcccctcctaccccacctgttagccatggtcagtgggaggtgtcaggaggggtgcagggttactggaccctggttatagacagaccatgggcggccccctaggaaacagtagctggcgcgccttcaccacacaccttatatgcattatgcagcagctttttattctatctacggcttattaaaatttcagtgggaatgatggcagggatctctggagtccggctataattccccttctctgggggcagcctggatgggctccaggtttgcaagtgcaggcagggagtgtgtgtccagcataggtcatctgagagggtgggcagtgatcatggcccagtgctagataaccatacattacccatttaatctccatgacaccctgcaagggaagtcttcaccatttatagatgaggaaactgaggctccagcattaagtgtcccacccaagataagtgtcagaactgagacttgggcagagccacctaactgtctttctgtccccagaatgcctttcctaggggtcttctgggctcttgtcattttgcatcttagaaacctgcagggaagcaaggggagaggtgggaggcactttgcaaagatgctcaaactggagctttggatcctgaagggattcctaggtcagggatggtttgtggttcttggttcttgctgacttaaccttgttgaggaggcagagggctgtgtcttctgagggggtggaaacaggtgatgactgtccctgactaccccctctgtctttacagaaggagcccagcgaagtgccaacacctaagagacctcggggccgaccaaagggaagcaaaaacaagggtgctgccaagacccgggtgagacttgagatgggactacccctgggtggatgactagcagaggatcctcttgttggcaccatggccacggctgtggggaggtctgggaaggggctcagtcatctcagttgtgtacccccttccctggtacagggatggcagtgagtctttgctaactggggagagtggggcgatgactaaggtcttacttctggggggttggtcctgcccaggacactgcggagatcaggtcagaagtcccacagctttcctgatctagagaagggcagagtggggagaatggagggtccctgccagtccctgggctgagaatgttaccttctcttggggttccctggagcctgaaggggtggggacaggcagcaaaggccagattcacagtgacattagcctttcagaaaagttgttttgttttttattttattttttctaagacacgactcatatcctctgagtcatgggcggaggtgggagtagggggcgtgtgtgtatgtcgagggggcaaatgtggctggccagtcattgccagctggacttgggtgggcctgttgggtgagagtgttgggtcaccctgaacaggcaggtaggtctgccccccatcactattgggcatcgggtgagcactgatgagcattttggacttaggagatattttctctaaccctctagaaaaccaccacaactccaggaaggaaaccaaggggcagacccaaaaaactggtaggtgaagaagcagactgctgcttgcctcctgggctcttttgagtgagggtgttgagtacacagtacctgatgctatgcaccccctatggaaaggctctccttgacctgctgggacatcagattttacagaagtccagagaggggaaggtacctggcctgggctgtgcccatgagaagtgaggggtcccaggtataaatcagaccacatccccctgccctgccctgccctagttgtgtgtgggggtccctccctctcctgctcctagaatactcagaacttctaggggagatcttggaagtcatctagcctgtgtccccctcaattagagatgaggaaaggaagccatagggggaaggtttgtccttcctatgagcctctgcagaagagaaacagcgaaggagctgggccctgggaggggtcggtgctggagttctgatgtgacccaccacactgcactggagggcaccatccaattctgggtccccaaacagctggtggaaaggctcggtgggctgagtcaagaagctgcctctagggggccactgcagttagggtcaccccagccttccagctcctggccctctcctacccccagcctgccccctcaaatccctgaagctgtcattccttgagctgagccactgctggggtgggggggttagggggtgctgctggccaggccccaagagtgagtaacaggaaacaagttgttttggagtttgtgcctggcacgggggctgtagccccgtgtggtgtcccgacattcccgcccagtgagtgagccccggcggcacacacttccccttcctccccaccccggcctagggtcagccctcggccaccccggagggccagggcaccacagcacagcatctgcccctgtgggccaaggacctggttcccctgcacccaccagcgggctcttgcaccttccagccaccccttcccatttcctcccccagccacctcttcccccacctcctcttctcccctagggagtcagtcacatcctgaagctcattgctgccctgagctctgccctcctgccctccctgggcctgggggccaagggggcttggctcctggctctgggtgagagcagcatgtgtgtggggttttttcctccttttaaattctttttatgaatgaagccgggccgtggaggttgctgagtcacccacacactcagccctgactcatccctcttcaggagagccagggagtgcagggagcgggtggggccagcctctgggggtggaagagggggaccgggccagagctcacaccaacaactgcccacctcacaggagaaggaggaagaggagggcatctcgcaggagtcctcggaggaggagcagtgacccatgcgtgccgcctgctcctcactggaggagcagcttccttctgggactggacagctttgctccgctcccaccgcccccgccccttccccaggcccaccatcaccaccgcctctggccgccacccccatcttccacctgtgccctcaccaccacactacacagcacaccagccgctgcagggctcccatgggctgagtggggagcagttttcccctggcctcagttcccagctccccccgcccacccacgcatacacacatgccctcctggacaaggctaacatcccacttagccgcaccctgcacctgctgcgtccccactcccttggtggtggggacattgctctctgggcttttggtttgggggcgccctctctgctccttcactgttccctctggcttcccatagtggggcctgggagggttcccctggccttaaaaggggcccaagccccatctcatcctggcacgccctactccactgccctggcagcagcaggtgtggccaatggaggggggtgctggcccccaggattcccccagccaaactgtctttgtcaccacgtggggctcacttttcatccttccccaacttccctagtccccgtactaggttggacagcccccttcggctacaggaaggcaggaggggtgagtcccctactccctcttcactgtggccacagcccccttgccctccgcctgggatctgagtacatattgtggtgatggagatgcagtcacttattgtccaggtgaggcccaagagccctgtggccgccacctgaggtgggctggggctgctcccctaaccctactttgcttccgccactcagccatttccccctcctcagatggggcaccaataacaaggagctcaccctgcccgctcccaacccccctcctgctcctccctgccccccaaggttctggttccatttttcctctgttcacaaactacctctggacagttgtgttgttttttgttcaatgttccattcttcgacatccgtcattgctgctgctaccagcgccaaatgttcatcctcattgcctcctgttctgcccacgatcccctcccccaagatactctttgtggggaagaggggctggggcatggcaggctgggtgaccgactaccccagtcccagggaaggtggggccctgcccctaggatgctgcagcagagtgagcaagggggcccgaatcgaccataaagggtgtaggggccacctcctccccctgttctgttggggaggggtagccatgatttgtcccagcctggggctccctctctggtttcctatttgcagttacttgaataaaaaaaatatccttttctggactggagtctcctgtggtgtgtgcccctaaagcctggggcaggtaggatgggtgacacttgtgttctggcccccatccttcaggctgcaggaagggaggggaaatagcactggaatcacctccggggaaggtcattttaagcctcttgatgaaatcaaaacccctagccacaaaacattttatttacaaaatatatactgaatactatacatctggccccatcaccatggaaacaactccaaagcctgcctggggatttgtgcccaagcccagcccaggagggctagagaaagcaaaggtgtctaccagccgccgccatcccagaaggaaagcctcttcccatgagtgcctgtgggtgggcggtgagctcaacacccacaaagggcagaaggcctgggggcagtgaggtgatggtgagggcatgggaagcagatgctgctgagggtgggtggagggagaaatggagacccagcacccagcagggggagccaggtgacagcaggggaagcagatggcagggccccaggcagtccaggaccccaggctctgaagggtggggcaagggggtcaggtcacgtcttgacatccagcagtggcatccgcttgtgctggtagccactctgccagccatgtaccacctgtcggggaggagaccacaccacaaggctgggctgtgttccctgggagtctgcagcacccagttacagcccaagtaagcagaaccaggctctggtttcagtgtggacgagtatggctgggaacagggctgactcccaccttgcctcattctccccctggcccccaagtgctcaccttggggtctcccatgtcagagagcagctcctgctcagcctcatgcagttcctcagctgggtcatagctgtacatggggagcaggtgatggcgcagccggtccaccctggggagcaggggaggggactcagctaggaggtccccccaaccctcatcaaacacctggctgcctcgtctctcctccctttcccaggcaggggcaattccagtgggtgccttttgggacacactatacctccaagaatacaaccctgattctacaaaggggctttccccagtgagtaacctgaggctggggcagggaaaacaaatttcaggcttgtatcaggatggctgagggacatcttacagaaaagtcagagcctatgagcaggaatttcagaacgggtgtggggttagggcgggtgggggacagggacactcaccgctttttcttctgtacatacattacctgcaacagagacacagcactgtgggggctgctgagcccaggaaggcccacaggcagagagaggcccacctccacacccttcactcccttaacaggacagtggggactctgtgcagactggaccaggcccacccagcccctgccttagcaaagctgtgggtgtctgtgtgtatatgagggctccttaccacagccaccaccaccccgaccagggtgatgaggaagaagggccccaacacatagcccaccatggagtcgctgttggcctggggggcattgggcacagtggtgttactcatgacatcagcagccggagggctgggtggtcagcatgggcagtggcgcttcgggagggcgcctccactgggctccctgggaaggaggaagggaggttatcagttgcacccaggtgacatccagactctggatccctcccccagagctgaagatctatgaaaactggtcccaggtcaaatcctgggaggagggatcctccaggtagatgtactgggtgtgaccctccagtgagtcttggcaaatcctggcaggaaaggggatcaagggaaggcctggatccagggctgagtcttgcccaactcctatccctaaatcagggtggggcccagctcagatgctggccaaacatttataagtctcagcttctggggaaagattaagtgcaggtttcaggtgcctgccccagcccttttggggcattgggctgccagcacctgtccagtggagcaaaatggataaatgaggtctaaaggaaggacctgcactgcagccaggggtgagatgggagcatctgaaggagcccgcttccatcctggtccaatcccacttcaagcgatgggctccatgcctgagttctatgcccttgtccctggtgtcacctcagacatacagcccaaacaccctctcccccatctgtctcgtgtgccagggtggacacgagtgggtaaagctggattgtatcttcaagatgatgtcaccttcctcttgtctccacccggggctccgcccaggtccctcccctcctggcctgagctgacaggcagaggtggagagggtcagtccccatcgacagaagcaaagagatcgtcctggggcagtttgcacgctgatggcccaaggtccgcgacccaggttcgcttgagtctctatcagagggcaaggtatgagcgacctacccccgtgtccgtagggcacggggcatcgagcttgcccttacccagtcgtatgctcatcgtcccaggtcaagggggcatgccagggtggggagggcgtcaggccgctgctaggatgcgggccagcaacagcggacaggaggtggttcccacggcgctgggaggctcaggccggaggtgggggtgttgggggatgcggatgggccgccccgcgcccgaacatcctggaagcccgtcacccgaggcgtggacccgtgccggcgctctgcagcccagccggcctggccatgccttacctcccgccgctgcagccccgacaggaacgccctcggttggctcccgggccccggaaaagccgtcaggcgcgtgatcaaaggacccggggaaatgggccgggcctcagcacccggacgcagccaatccggtagcggaaagccggtggcctggagatttctggagccgccaatccggaggcgggggtgggcggtgcgaaggcggggacagcggggcttgcagggtccgcccggcggcggcagggggcagccgagggctgcgtagtgggggaggagaacgcgacgcggggccggacggggtagggcggggcgcgcgcagttttccggcggcccctggcccgcccgcgtctggagctccgattctgggaggtccccggcgcccacttcattcacccctctcgttgcagccagaatagggtcgcgccacgatctaacgttgagcccaggcccttcgcggcaagaccctgctccgggcccactcggcctccgtctgtgtttgttccctggccttcgggctgtgctcggctggtagagtacggcaggtctgggctaccgagggccctggcacgcccaccctctctgcgcctgtcttaacgtctgtaaaacaagctgtgtgaggattattattattactttttttttgagatggagtctgtctctgtcgtccaggctggagtgcagtggcacgatctcagctcactgcaatctctgcctccctggttcaagctattctcttgcctcagcctcccgagtagctgggactacaggtgtgcaccaccatgcctggctaatttttgtatttttagtagagagggggtttcaacatgttcgccaggatggtctcttaacacctgacctcaggtgatccacctgcctcagcctcctaaagtgctgggattacaggcgtgagccactgggcctggccggattttactttcttttctcctaagagagaacacccttgtgagctaggcagggcaagtggagcaatcgcaatttgcagatgagttaattgatgctcaagcaatgagatgacttctcagggcccttggcctgatcattaagggcagggtgggatgagatgacaggtgggcctctcttcttggacagctctctgctgacagctgccccagagctacatttgaggcctggtgtcttgctgtgttcaggcttcatatctgatgagagtacctccaagtatagccgggaaaactgcagctctgccttccctcttcatgcagctaccgtttcaggaagcgggaggctagggtggggttgaggctacattgtgctaccatgctcgagttttgactgcctcctgatccatgctgctgtggttagtgcctggacttgtctgcccacttcagctaatgcctcactcatcctcgtgtcctccagctctggatccactgaacaaaccataaaagcaagacctgaaaggattgaactattttcagttaacttttagaatgaagctcaagaagatttataggaaggcaaaaatatccagtttttataatatctgacatccactaaaaaatggaacctggtggccaggtgcggtggctcatgcctgtaatcctagcactttgggaggccgaggtggtggatcacctgatgtcaggagttcgagaccagcctggccaaagaggtgaaaccccatctctactaaaaatacaaaaattagctgggcgtggtggcaggagcttgtaattccagctactcaggagactgaggcaggagaatcacttgaacccaggaggcagaggttgcagtgagccgagatcatgccattgcactccagtctggtgacaagagtgaaactctgtctcaaaaattaaaaaaaaaggaccctggctgggtgctgtggctcacacttgtaatcccagcacttaagacaaggaatgtatgaaaatatcccagtgatcttctagagatgaaaactacaatatcagattaaaaaaatcatactggacaggattaatcacactggacaggattaatggcaggttagatattacagaagaaaagacaagtgaacttgagggcatagcaatagaaactacccaaaataaaacccaaagataaaaaaatccaaaaaaaaaaaaaaagaaaaatgaaaaaaggatcagtgagttgcgggataaccgtaagtggcctaatatatggataattagaggtccaaaaggagaagaaagaaaggacagaaaaatatttgaagaaaccatgaccaaaagctttccaaacttgggccaggcgcagtggctcactcctgtaatcccagcactttgggaggccgaggcaggtgtatcacctgaggtcaggagtttgagaccagccggccaacatgaagaaaccccatctctactaaaaatacaaaaatttgccaggcgtgttggcacatgcctgtaatcccagctacttgggaggctgaggtaggaggatcgcttgaacccgggaggcagaggttgcagtgagctgagactgtgccattgtactccagcctgggcaacaagagcaaaactcccgtctcaaaaaacaaaacaacaacaacaaaaaactttccaaacttaaagatggctataaacctacagacccaggaagcacaataagcccaagcacaagcaacatgaagaaactgtgccaaagcacatcgtaatcaaattgctcaaagccagtggtaaagatgttacacacagaggaacaaagttaagaatggcataaaatttcacttgaaacaatccaggtgaaaagatggtggagcaacatcttttatttttttatttatttttattttattttattttttttttttgagacagagtctcgctctgtcgcccaggctggagtgcagtggtgcaatctcagctcactgcaagctccgcctccagggttcccgccattctcctgcctcaggctcccgagtagctgggactacaggcacccactaccacgccctgctaattttttgtatttttagtagagacagggtttcaccgtgttagccaggatggtctcgatcctctgatctcgtgatacgcccgcctcggccttgaaaagtgctgggattacaggcgtaggcaactccgcgcctggctaacatcttttaactacttaaagaaaaaactctcgatctagaatattggggaaaaaaaatctgtcaaaaacaagaaataaagatgttttcaggccaggcgtggtgactcacgcctgtaattccagcactttgggaagccgaggcgggtggatcacttgagcccaggagtttgagaccagcctgggcagcatggtcaaagcctgtctctaccagaaatacaaacattagccagtctcataacctggtctcaaaataaataaatagataaaaattaaaacataaaattaaaaaatttttgaaaacgatgttttcagacatacaaaactgaaaggaatcatcaccagtagacctgcactacaagaactgttaaaggaaattcttcaggcagaaaggtaattgtaccaaataaaaatatgatcccacaagagaaagaaagagcatccaaatcggtaaagaggaagtcatactgtcactgtttgccgatgatatgatctttgacaaagcaaacaaaaacataaagtggggaaagcacaccctattcaacaaatggtgctgggataattggcaagccacatgtaggagaatgaaactggatcctcatctctcaccttatacaaaaatcaactcaagatggatcaaagatgtaaatctaagacctaaaaccataaaaattctagaagataacatcagaaaatcccctctagacattggcttaggcaaagacttcatgaccaagaacccaaaagcagattcaacaaaagcaaagataaatagatgggattaattaaactaaatagcttctgcacagcaaaagaaataatcagcaaacagacaacccacagaatgggagaaaatcttcacaatctatacatctaacaaaggactaatatccagattctacaaggaactgaaacaaatcagcgagaaaaaaccaaacaatctcatcaaaaagtaggctaaggaatgaatagacaattctcaagaaaaagatatgcaagtggccaacaaacatgaaaaaatgctcaacatcactaatgatcagggaaatgcaaatcaaaaccacaatgtgataccaccttactcctgcaagatggccataattttaaaaatcaaaaagtaggctgggcatggtggctcatgtctgtaatcccagcactttgggaggccaaggcgagcagatcatgaggtcaggagatcgaaaccaccctggctaacccaatgaaaccccgtctctactaaaaatacaaaaaattagccgggtgtggtggcatgcccctgtaatcccagctacttgggaggctgaggcaggagaatcacttgaacctgggaggtggaggttgcagtgaactgagatcgtgccactgcactccagcctgggcgacagagtgagactgactctgcctcaaaaaaaaaaaaaaaaaaaaagaaagaaacacaatagatattggcatggatgtggtgaaaagggaacacttttacgctgctggtgggaatgtaaactagtacgaccactgtggaaaacagtgtggatattccttaaataactaaaagtagatctaccatttgattgagcaatcccactactgggtatctacccagagtaaaagaagtcattatatgaaaaaaagacacttgcagctgggctcagtggctcagcactttgtagtcccagcactttgggaggccgaggtggacggatcacctaaggtcgggagtttgagaccagcctggccaacatggtgaaaccccgtctctactaaaactacaaaaattagctgggcgtgatggcacacacctgtagtcccagctactttggaggctgaggcacgagaatcgcttgaacccaagaggtggaggttgcaatgagccgagatcacgccactgcactccactccagcctgggcaaaagaataagacagagcgagaacttgtctcaacaaaaaaaagaaaaagaaagaagacacttgcacacacatgtttatagcagcacaattcggaattgccaaaatatggaaccagcccaaatgcccatcaatgaatgagtgaataaagaaaatgtgatatatatacataccatggaatactattttatatatatatatatatatatatatatatatatatatatatatatatatatatacacacaccatggaatactactcagccataaaaaggaatgaaataataggatttgcagcaacctggatggagttggagaccattattctaagtgaagtaactcagaaatggaaaaccaaacaccatatgttctcacttgtaagtaggagctaagccatgaggatgcaaaggcataagaatgatacagtggacttggaggacttgggggaaaggatgggaggggggtgagggataaaagactacacatcgggtacagtgtacacgactcaggggatgggtgcaccagaatctcagaaatcactactaaagaacttaccaaacaccacctgttccccaaaaacctactgaaaaaaaaaattcaaaaaaaatatggacctatccaaaggaatgaagaatactgaaaatggtagctatgtgagtatgtatatatgtaaatatatatatatgtgtcagtatgtatatatgtacaaacatatatgcacatatattccacacacatatacacatatattccctccaccaccaccatttttctttgtttgcttttatttatttatttttttgagacagagtttcactcttgttgcccaggctggagtgcaatggcgcgatctcggctcactgcaacctccgcctcccaggttcaagcgattctcctgcctcagcctcctgagtaactaggattacaggcacccaccaccacgcccggctaatttttgtatttttcgtggagatggggtttcaccttggccaggctagtctcaaactcctgacctcaggtgacccacccgcctcagccacgcaaagtgctgggattacaggcatgagccaccatgcctggcctgtttgtttttagagaccagttccccctatgttgcctaggctggtctagaactccttggttcaagcaatcctcatgcctcagcctcccaagtagctgggattacaggagcatgtcactgtgcccggcttgccccatctgttagttaaatctttttaaagaggtaattgaggccaggtacgttggctcacacctgtaatcccaacactttgggaggccaaggcaggccaatcacctgaggtaaggaatttgagaccagcctggctaacatggcgaaaccccgtctttactaaaaatagccgggtgtggtggcacgcacctgtagtcccagctactcggggagactgaggcaggagaatcgcttgaacccaggagacgaaggttaaagtgagccgagatcgtaccactgcattccaccctggaagacagagcaagactccatctcaaaaaaagaaaaaaaaaagtaatcgattgtaaaaaacaaaacaaaaagcccaatactgtattgtgggacttttgcacatggaacatttatcaagacagaccatattctgagccataaaacaagtctcagccaggcgtggtggctcacgcctgtaatcccagcactttgggaggccaaggcgggtggatcacctgatgtcaggagttccagactagcctggccaacatggtgaaacctcgtctctactaaaaatgcaaaaattagccaggtgtggtggcacatgcatgtgattccagctacttgggagctgaggcaggagaatcacttgaacccgggaggcggaggttgcagtgagaagagatcatgccactgcactacagcctgggtgacaagagtgaaactctgtctcaaacaaaacaaaacaaaaaacaagtctcgataaatataaaggattcaatttaatgtattactttaatagcataaaggttgggaaagaaatgggaatatactactgtattcatatatatatgaggttgtataatatcacttaatgatagactgtggtgagttaatgatgtatagtatgaaccctaaagtaactaataaagtaacagagttatagataccaacaaagaaaataaagtggatataaaataagaaatctaaaaaaaaaaaaaagcagaaaaagaggaacaggggaaccaagaacagataagataattagaaaac

SEQ ID NO: 166 - DNA, 764 bp, Homo sapiens
tctttttaagctcccctgagccggtgctgcgctcctctaattgggactccgagccggggctatttctggcgctggcgcggctccaagaaggccatcccagccatcactcttccacctgctccttagagaagggaagatgagtgagtcgagctcgaagtccagccagcccttggcctccaagcaggaaaaggacggcactgagaagcggggccggggcaggccgcgcaagcagcctccggtgagtcccgggacagcgctggtagggagtcagaaggagcccagcgaagtgccaacacctaagagacctcggggccgaccaaagggaagcaaaaacaagggtgctgccaagacccggaaaaccaccacaactccaggaaggaaaccaaggggcagacccaaaaaactggtaggtgaagaagcagactgctgcttgcctcctgggctcttttgagtgagggtgttgagtacacagtacctgatgctatgcaccccctatggaaaggctctccttgacctgctgggacatcagattttacagaagtccagagaggggaaggtacctggcctgggctgtgcccatgagaagtgaggggtcccaggtataaatcagaccacatccccctgccctgccctgccctagttgtgtgtgggggtccctccctctcctgctcctagaatactcagaacttctaggggagatcttggaagtcatctagcctgtgtccccctcaattagagatgaggaaaggaagccatagggggaa

SEQ ID NO: 167 - protein, 104 aa, Homo sapiens
MSESSSKSSQPLASKQEKDGTEKRGRGRPRKQPPVSPGTALVGSQKEPSEVPTPKRPRGRPKGSKNKGAAKTRKTTTTPGRKPRGRPKKLVGEEADCCLPPGLF

SEQ ID NO: 168 - DNA, 1739 bp, Homo sapiens
tctttttaagctcccctgagccggtgctgcgctcctctaattgggactccgagccggggctatttctggcgctggcgcggctccaagaaggccatcccagccatcactcttccacctgctccttagagaagggaagatgagtgagtcgagctcgaagtccagccagcccttggcctccaagcaggaaaaggacggcactgagaagcggggccggggcaggccgcgcaagcagcctccggtgagtcccgggacagcgctggtagggagtcagaaggagcccagcgaagtgccaacacctaagagacctcggggccgaccaaagggaagcaaaaacaagggagaaggaggaagaggagggcatctcgcaggagtcctcggaggaggagcagtgacccatgcgtgccgcctgctcctcactggaggagcagcttccttctgggactggacagctttgctccgctcccaccgcccccgccccttccccaggcccaccatcaccaccgcctctggccgccacccccatcttccacctgtgccctcaccaccacactacacagcacaccagccgctgcagggctcccatgggctgagtggggagcagttttcccctggcctcagttcccagctccccccgcccacccacgcatacacacatgccctcctggacaaggctaacatcccacttagccgcaccctgcacctgctgcgtccccactcccttggtggtggggacattgctctctgggcttttggtttgggggcgccctctctgctccttcactgttccctctggcttcccatagtggggcctgggagggttcccctggccttaaaaggggcccaagccccatctcatcctggcacgccctactccactgccctggcagcagcaggtgtggccaatggaggggggtgctggcccccaggattcccccagccaaactgtctttgtcaccacgtggggctcacttttcatccttccccaacttccctagtccccgtactaggttggacagcccccttcggctacaggaaggcaggaggggtgagtcccctactccctcttcactgtggccacagcccccttgccctccgcctgggatctgagtacatattgtggtgatggagatgcagtcacttattgtccaggtgaggcccaagagccctgtggccgccacctgaggtgggctggggctgctcccctaaccctactttgcttccgccactcagccatttccccctcctcagatggggcaccaataacaaggagctcaccctgcccgctcccaacccccctcctgctcctccctgccccccaaggttctggttccatttttcctctgttcacaaactacctctggacagttgtgttgttttttgttcaatgttccattcttcgacatccgtcattgctgctgctaccagcgccaaatgttcatcctcattgcctcctgttctgcccacgatcccctcccccaagatactctttgtggggaagaggggctggggcatggcaggctgggtgaccgactaccccagtcccagggaaggtggggccctgcccctaggatgctgcagcagagtgagcaagggggcccgaatcgaccataaagggtgtaggggccacctcctccccctgttctgttggggaggggtagccatgatttgtcccagcctggggctccctctctggtttcctatttgcagttacttgaataaaaaaaatatccttttctgga

SEQ ID NO: 169 - protein, 326 aa, Homo sapiens
MSESSSKSSQPLASKQEKDGTEKRGRGRPRKQPPVSPGTALVGSQKEPSEVPTPKRPRGRPKGSKNKGEGGRGGHLAGVLGGGAVTHACRLLLTGGAASFWDWTALLRSHRPRPFPRPTITTASGRHPHLPPVPSPPHYTAHQPLQGSHGLSGEQFSPGLSSQLPPPTHAYTHALLDKANIPLSRTLHLLRPHSLGGGDIALWAFGLGAPSLLLHCSLWLPIVGPGRVPLALKGAQAPSHPGTPYSTAAAGVANGGGCWPPGFPQPNCLCHHVGLTFHPSPTSLVPVLGWTAPFGYRKAGGVSPLLPLHCGHSPLALRLGSEYILW

SEQ ID NO: 170 - DNA, 1886 bp, Homo sapiens
tctttttaagctcccctgagccggtgctgcgctcctctaattgggactccgagccggggctatttctggcgctggcgcggctccaagaaggcatccgcatttgctaccagcggcggccgcggcggagccaggccggtcctcagcgcccagcaccgccgctcccggcaacccggagcgcgcaccgcagccggcgcgaagctcgcgcatcccagccatcactcttccacctgctccttagagaagggaagatgagtgagtcgagctcgaagtccagccagcccttggcctccaagcaggaaaaggacggcactgagaagcggggccggggcaggccgcgcaagcagcctccgaaggagcccagcgaagtgccaacacctaagagacctcggggccgaccaaagggaagcaaaaacaagggtgctgccaagacccggaaaaccaccacaactccaggaaggaaaccaaggggcagacccaaaaaactggagaaggaggaagaggagggcatctcgcaggagtcctcggaggaggagcagtgacccatgcgtgccgcctgctcctcactggaggagcagcttccttctgggactggacagctttgctccgctcccaccgcccccgccccttccccaggcccaccatcaccaccgcctctggccgccacccccatcttccacctgtgccctcaccaccacactacacagcacaccagccgctgcagggctcccatgggctgagtggggagcagttttcccctggcctcagttcccagctccccccgcccacccacgcatacacacatgccctcctggacaaggctaacatcccacttagccgcaccctgcacctgctgcgtccccactcccttggtggtggggacattgctctctgggcttttggtttgggggcgccctctctgctccttcactgttccctctggcttcccatagtggggcctgggagggttcccctggccttaaaaggggcccaagccccatctcatcctggcacgccctactccactgccctggcagcagcaggtgtggccaatggaggggggtgctggcccccaggattcccccagccaaactgtctttgtcaccacgtggggctcacttttcatccttccccaacttccctagtccccgtactaggttggacagcccccttcggctacaggaaggcaggaggggtgagtcccctactccctcttcactgtggccacagcccccttgccctccgcctgggatctgagtacatattgtggtgatggagatgcagtcacttattgtccaggtgaggcccaagagccctgtggccgccacctgaggtgggctggggctgctcccctaaccctactttgcttccgccactcagccatttccccctcctcagatggggcaccaataacaaggagctcaccctgcccgctcccaacccccctcctgctcctccctgccccccaaggttctggttccatttttcctctgttcacaaactacctctggacagttgtgttgttttttgttcaatgttccattcttcgacatccgtcattgctgctgctaccagcgccaaatgttcatcctcattgcctcctgttctgcccacgatcccctcccccaagatactctttgtggggaagaggggctggggcatggcaggctgggtgaccgactaccccagtcccagggaaggtggggccctgcccctaggatgctgcagcagagtgagcaagggggcccgaatcgaccataaagggtgtaggggccacctcctccccctgttctgttggggaggggtagccatgatttgtcccagcctggggctccctctctggtttcctatttgcagttacttgaataaaaaaaatatccttttctgga

SEQ ID NO: 171 - protein, 96 aa, Homo sapiens
MSESSSKSSQPLASKQEKDGTEKRGRGRPRKQPPKEPSEVPTPKRPRGRPKGSKNKGAAKTRKTTTTPGRKPRGRPKKLEKEEEEGISQESSEEEQ

SEQ ID NO: 172 - DNA, 1919 bp, Homo sapiens
tctttttaagctcccctgagccggtgctgcgctcctctaattgggactccgagccggggctatttctggcgctggcgcggctccaagaaggcatccgcatttgctaccagcggcggccgcggcggagccaggccggtcctcagcgcccagcaccgccgctcccggcaacccggagcgcgcaccgcagccggcgcgaagctcgcgcatcccagccatcactcttccacctgctccttagagaagggaagatgagtgagtcgagctcgaagtccagccagcccttggcctccaagcaggaaaaggacggcactgagaagcggggccggggcaggccgcgcaagcagcctccggtgagtcccgggacagcgctggtagggagtcagaaggagcccagcgaagtgccaacacctaagagacctcggggccgaccaaagggaagcaaaaacaagggtgctgccaagacccggaaaaccaccacaactccaggaaggaaaccaaggggcagacccaaaaaactggagaaggaggaagaggagggcatctcgcaggagtcctcggaggaggagcagtgacccatgcgtgccgcctgctcctcactggaggagcagcttccttctgggactggacagctttgctccgctcccaccgcccccgccccttccccaggcccaccatcaccaccgcctctggccgccacccccatcttccacctgtgccctcaccaccacactacacagcacaccagccgctgcagggctcccatgggctgagtggggagcagttttcccctggcctcagttcccagctccccccgcccacccacgcatacacacatgccctcctggacaaggctaacatcccacttagccgcaccctgcacctgctgcgtccccactcccttggtggtggggacattgctctctgggcttttggtttgggggcgccctctctgctccttcactgttccctctggcttcccatagtggggcctgggagggttcccctggccttaaaaggggcccaagccccatctcatcctggcacgccctactccactgccctggcagcagcaggtgtggccaatggaggggggtgctggcccccaggattcccccagccaaactgtctttgtcaccacgtggggctcacttttcatccttccccaacttccctagtccccgtactaggttggacagcccccttcggctacaggaaggcaggaggggtgagtcccctactccctcttcactgtggccacagcccccttgccctccgcctgggatctgagtacatattgtggtgatggagatgcagtcacttattgtccaggtgaggcccaagagccctgtggccgccacctgaggtgggctggggctgctcccctaaccctactttgcttccgccactcagccatttccccctcctcagatggggcaccaataacaaggagctcaccctgcccgctcccaacccccctcctgctcctccctgccccccaaggttctggttccatttttcctctgttcacaaactacctctggacagttgtgttgttttttgttcaatgttccattcttcgacatccgtcattgctgctgctaccagcgccaaatgttcatcctcattgcctcctgttctgcccacgatcccctcccccaagatactctttgtggggaagaggggctggggcatggcaggctgggtgaccgactaccccagtcccagggaaggtggggccctgcccctaggatgctgcagcagagtgagcaagggggcccgaatcgaccataaagggtgtaggggccacctcctccccctgttctgttggggaggggtagccatgatttgtcccagcctggggctccctctctggtttcctatttgcagttacttgaataaaaaaaatatccttttctgga

SEQ ID NO: 173 - protein, 107 aa, Homo sapiens
MSESSSKSSQPLASKQEKDGTEKRGRGRPRKQPPVSPGTALVGSQKEPSEVPTPKRPRGRPKGSKNKGAAKTRKTTTTPGRKPRGRPKKLEKEEEEGISQESSEEEQ

SEQ ID NO: 174 - DNA, 1827 bp, Homo sapiens
ctgggtgagaacagagaagagagctggtggtgggcaccacccctggctgtgtgattggctctttttggtcctgagtcttgcaccttgccagataggcaatattgtcagtgagcatcccagccatcactcttccacctgctccttagagaagggaagatgagtgagtcgagctcgaagtccagccagcccttggcctccaagcaggaaaaggacggcactgagaagcggggccggggcaggccgcgcaagcagcctccggtgagtcccgggacagcgctggtagggagtcagaaggagcccagcgaagtgccaacacctaagagacctcggggccgaccaaagggaagcaaaaacaagggtgctgccaagacccggaaaaccaccacaactccaggaaggaaaccaaggggcagacccaaaaaactggagaaggaggaagaggagggcatctcgcaggagtcctcggaggaggagcagtgacccatgcgtgccgcctgctcctcactggaggagcagcttccttctgggactggacagctttgctccgctcccaccgcccccgccccttccccaggcccaccatcaccaccgcctctggccgccacccccatcttccacctgtgccctcaccaccacactacacagcacaccagccgctgcagggctcccatgggctgagtggggagcagttttcccctggcctcagttcccagctccccccgcccacccacgcatacacacatgccctcctggacaaggctaacatcccacttagccgcaccctgcacctgctgcgtccccactcccttggtggtggggacattgctctctgggcttttggtttgggggcgccctctctgctccttcactgttccctctggcttcccatagtggggcctgggagggttcccctggccttaaaaggggcccaagccccatctcatcctggcacgccctactccactgccctggcagcagcaggtgtggccaatggaggggggtgctggcccccaggattcccccagccaaactgtctttgtcaccacgtggggctcacttttcatccttccccaacttccctagtccccgtactaggttggacagcccccttcggctacaggaaggcaggaggggtgagtcccctactccctcttcactgtggccacagcccccttgccctccgcctgggatctgagtacatattgtggtgatggagatgcagtcacttattgtccaggtgaggcccaagagccctgtggccgccacctgaggtgggctggggctgctcccctaaccctactttgcttccgccactcagccatttccccctcctcagatggggcaccaataacaaggagctcaccctgcccgctcccaacccccctcctgctcctccctgccccccaaggttctggttccatttttcctctgttcacaaactacctctggacagttgtgttgttttttgttcaatgttccattcttcgacatccgtcattgctgctgctaccagcgccaaatgttcatcctcattgcctcctgttctgcccacgatcccctcccccaagatactctttgtggggaagaggggctggggcatggcaggctgggtgaccgactaccccagtcccagggaaggtggggccctgcccctaggatgctgcagcagagtgagcaagggggcccgaatcgaccataaagggtgtaggggccacctcctccccctgttctgttggggaggggtagccatgatttgtcccagcctggggctccctctctggtttcctatttgcagttacttgaataaaaaaaatatccttttctgga

SEQ ID NO: 175 - protein, 107 aa, Homo sapiens; identical to SEQ ID NO: 173

SEQ ID NO: 176 - DNA, 1807 bp, Homo sapiens
tctttttaagctcccctgagccggtgctgcgctcctctaattgggactccgagccggggctatttctggcgctggcgcggctccaagaaggccatcccagccatcactcttccacctgctccttagagaagggaagatgagtgagtcgagctcgaagtccagccagcccttggcctccaagcaggaaaaggacggcactgagaagcggggccggggcaggccgcgcaagcagcctccggtgagtcccgggacagcgctggtagggagtcagaaggagcccagcgaagtgccaacacctaagagacctcggggccgaccaaagggaagcaaaaacaagggtgctgccaagacccggaaaaccaccacaactccaggaaggaaaccaaggggcagacccaaaaaactggagaaggaggaagaggagggcatctcgcaggagtcctcggaggaggagcagtgacccatgcgtgccgcctgctcctcactggaggagcagcttccttctgggactggacagctttgctccgctcccaccgcccccgccccttccccaggcccaccatcaccaccgcctctggccgccacccccatcttccacctgtgccctcaccaccacactacacagcacaccagccgctgcagggctcccatgggctgagtggggagcagttttcccctggcctcagttcccagctccccccgcccacccacgcatacacacatgccctcctggacaaggctaacatcccacttagccgcaccctgcacctgctgcgtccccactcccttggtggtggggacattgctctctgggcttttggtttgggggcgccctctctgctccttcactgttccctctggcttcccatagtggggcctgggagggttcccctggccttaaaaggggcccaagccccatctcatcctggcacgccctactccactgccctggcagcagcaggtgtggccaatggaggggggtgctggcccccaggattcccccagccaaactgtctttgtcaccacgtggggctcacttttcatccttccccaacttccctagtccccgtactaggttggacagcccccttcggctacaggaaggcaggaggggtgagtcccctactccctcttcactgtggccacagcccccttgccctccgcctgggatctgagtacatattgtggtgatggagatgcagtcacttattgtccaggtgaggcccaagagccctgtggccgccacctgaggtgggctggggctgctcccctaaccctactttgcttccgccactcagccatttccccctcctcagatggggcaccaataacaaggagctcaccctgcccgctcccaacccccctcctgctcctccctgccccccaaggttctggttccatttttcctctgttcacaaactacctctggacagttgtgttgttttttgttcaatgttccattcttcgacatccgtcattgctgctgctaccagcgccaaatgttcatcctcattgcctcctgttctgcccacgatcccctcccccaagatactctttgtggggaagaggggctggggcatggcaggctgggtgaccgactaccccagtcccagggaaggtggggccctgcccctaggatgctgcagcagagtgagcaagggggcccgaatcgaccataaagggtgtaggggccacctcctccccctgttctgttggggaggggtagccatgatttgtcccagcctggggctccctctctggtttcctatttgcagttacttgaataaaaaaaatatccttttctgga

SEQ ID NO: 177 - protein, 107 aa, Homo sapiens; identical to SEQ ID NO: 173
